(19) United States
(12) Patent Application Publication
(10) Pub. No.: US 2022/0313799 A1
(43) Pub. Date: Oct. 6, 2022

(54) COMPOSITIONS AND METHODS FOR EDITING A MUTATION TO PERMIT TRANSCRIPTION OR EXPRESSION

(71) Applicant: Beam Therapeutics Inc., Cambridge, MA (US)

(72) Inventors: Jason Michael GEHRKE, Cambridge, MA (US); Luis BARRERA, Cambridge, MA (US); Angelica MESSANA, Cambridge, MA (US)

(73) Assignee: Beam Therapeutics Inc., Cambridge, MA (US)

(21) Appl. No.: 17/638,757

(22) PCT Filed: Aug. 28, 2020
(86) PCT No.: PCT/US2020/048510

§ 371 Date: Feb. 25, 2022

Related U.S. Application Data
(60) Provisional application No. 62/893,638, filed on Aug. 29, 2019.

(51) Int. Cl. A61K 38/50; A61K 35/28; A61K 35/545; A61P 43/00; C12N 9/22; C12N 9/78

(52) U.S. Cl. CPC A61K 38/50; A61K 35/28; A61K 35/545; A61P 43/00; C12N 9/22; C12N 9/78

(57) ABSTRACT

The present invention features compositions and methods for editing a gene associated with Shwachman Diamond Syndrome (SDS) using a programmable nucleobase editor, such that the gene is permissive for transcription and generates a functional gene product (e.g., providing a splice site and/or altering a nonsense mutation).

### CROSS REFERENCE TO RELATED APPLICATION

[0001] This application is an International PCT Application that claims priority to and benefit of U.S. Provisional Application No. 62/893,638, filed Aug. 29, 2019, the contents of which are hereby incorporated by reference in their entirety.

### BACKGROUND OF THE INVENTION

[0002] Shwachman Diamond Syndrome (SDS) is a rare autosomal recessive, multi-system disease characterized by exocrine pancreatic insufficiency, impaired hematopoiesis, and leukemia predisposition. Patients suffering from SDS display bone marrow failure. Other clinical features include skeletal, immunologic, hepatic, and cardiac disorders. Around 90% of patients with clinical features of SDS have biallellic mutations in the evolutionarily conserved Shwachman-Bodian-Diamond Syndrome (SBDS) gene located on chromosome 7. The SDBS protein plays a role in ribosome biogenesis and in mitotic spindle stabilization though its precise molecular function remains unclear. Currently, there is no cure for SDS, and patients having the disorder typically undergo repeated hospitalizations for complications, and on average only live to about age thirty-five. Accordingly, improved methods and therapeutics for treating SDS are urgently required.

### SUMMARY OF THE INVENTION

[0003] As described below, the present invention features products, compositions and methods for editing a gene associated with Shwachman Diamond Syndrome (SDS) using a programmable nucleobase editor, such that the gene undergoes splicing and generates a functional gene product.

[0004] In an aspect, a method of editing a polynucleotide to permit transcription is provided, in which the method comprises contacting the polynucleotide with a base editor in complex with one or more guide polynucleotides, wherein the base editor comprises a polynucleotide programmable DNA binding domain and a deaminase domain, and wherein one or more of the guide polynucleotides targets the base editor to effect an alteration that introduces a mutation that is permissive for transcription. In an embodiment, the mutation that is permissive for transcription is a mutation that alters a stop codon, a mutation that introduces a splice acceptor or splice donor site, or a mutation that corrects a splice acceptor or splice donor site.

[0005] In an aspect, a method of editing a SBDS polynucleotide comprising a mutation associated with Shwachman Diamond Syndrome (SDS) is provided, in which the method comprises contacting the SBDS polynucleotide with a base editor in complex with one or more guide polynucleotides, wherein the base editor comprises a polynucleotide programmable DNA binding domain and a deaminase domain, and wherein one or more of the guide polynucleotides target the base editor to effect an alteration of a mutation associated with Shwachman Diamond Syndrome (SDS). In an embodiment of the method or its embodiments, the mutation associated with Shwachman Diamond Syndrome (SDS) results from a gene conversion. In an embodiment of the method or its embodiments, the mutation associated with Shwachman Diamond Syndrome (SDS) introduces a stop codon or alters splicing of the gene. In an embodiment of the method or its embodiments, the mutation associated with Shwachman Diamond Syndrome (SDS) encodes an SBDS polypeptide having a truncation.

[0006] In an embodiment of any of the above-delineated methods and embodiments thereof, the deaminase is a cytidine deaminase or an adenosine deaminase. In an embodiment, the deaminase is an adenosine deaminase. In embodiments, the adenosine deaminase is selected from ABE8 or an ABE8 variant as listed in Table 7A or Table 7B and the like herein. In another embodiment of the above-delineated method and embodiments thereof, the deaminase is a cytidine deaminase. In an embodiment, the cytosine deaminase is selected from one or more of BE4; rAPOBEC1; PpAPOBEC1; PpAPOBEC1 containing an H122A substitution; AmAPOBEC1; SsAPOBEC2; RrA3F; RrA3F containing an F130L substitution; a variant of BE4 where APOBEC-1 is replaced with the sequence of rAPOBEC1; a variant of BE4 where APOBEC-1 is replaced with the sequence of AmAPOBEC1; a variant of BE4 where APOBEC-1 is replaced with the sequence of SsAPOBEC2; a variant of BE4 where APOBEC-1 is replaced with the sequence of PpAPOBEC1; or a variant of BE4 where APOBEC-1 is replaced with the sequence of PpAPOBEC1 containing an H122A substitution. In an embodiment, the PpAPOBEC1 containing an H122A substitution, or a variant of BE4 where APOBEC-1 is replaced with the sequence of PpAPOBEC1 containing an H122A substitution, further comprises one or more amino acid mutations selected from R33A, W90F, K34A, R52A, H121A, or Y120F. In embodiments of the above-delineated methods and embodiments thereof, two or more guide polynucleotides target base editors to effect alterations of two or more mutations associated with Shwachman Diamond Syndrome (SDS).

[0007] In another aspect, a method of editing a SBDS polynucleotide comprising a mutation associated with Shwachman Diamond Syndrome (SDS) is provided, in which the method comprises contacting the SBDS polynucleotide with a adenosine base editor (ABE) in complex with one or more guide polynucleotides, wherein the base editor comprises a polynucleotide programmable DNA binding domain and a deaminase domain, and wherein one or more of the guide polynucleotides target the base editor to effect an A⋅T to G⋅C alteration of 183-184TA>CT Rs113993991 to generate a missense mutation. In an embodiment, the one or more guide polynucleotides target one of the following sequences: TGTAAATGTTTCCTAAGGTC or AATGTTTCCTAAGGTCAGGT. In an embodiment, the one or more sgRNA comprises one of the following sequences: UGUAAAUGUUUCCUAAGGUC or AAUGUUUCCUAAGGUCAGGU. In an embodiment, the ABE has a 5′-NGC-3′ or 5′-NGG-3′ PAM specificity.

[0008] In another aspect, a method of editing a SBDS polynucleotide comprising a mutation associated with Shwachman Diamond Syndrome (SDS), in which the method comprises contacting the SBDS polynucleotide with a cytidine base editor in complex with one or more guide polynucleotides, wherein the cytidine base editor (CBE) comprises a polynucleotide programmable DNA binding domain and an cytidine deaminase domain, and wherein one or more of the guide polynucleotides target the base editor to effect C⋅G to TA alteration of rs113993993 258+2T>C. In an embodiment, the CBE has a 5′-NGC-3′ PAM specificity or specificity for a PAM comprising 5′-NGC-3′. In an embodiment, the guide polynucleotide targets a polynucleotide target sequence selected from GTAAGCAGGCGGGTAACAGCTGC, AGCAGGCGGGTAACAGCTGCAGC, GCGGGTAACAGCTGCAGCATAGC, GTAAGCAGGCGGGTAACAGC, AGCAGGCGGGTAACAGCTGC, GCGGGTAACAGCTGCAGCAT, GCAGGCGGGTAACAGCTGC, CAGGCGGGTAACAGCTGC, AGGCGGGTAACAGCTGC, or AAGCAGGCGGGTAACAGCTGC. In an embodiment, the sgRNA comprises one of the following sequences: GUAAGCAGGCGGGUAACAGC; AGCAGGCGGGUAACAGCUGC; GCGGGUAACAGCUGCAGCA; GCAGGCGGGUAACAGCUGC, CAGGCGGGUAACAGCUGC, AGGCGGGUAACAGCUGC, or AAGCAGGCGGGUAACAGCUGC.

[0009] In other embodiments of any of the above-delineated methods and embodiments thereof, the contacting is in a cell, wherein the cell is a eukaryotic cell, a mammalian cell, or a human cell. In an embodiment, the cell is in vivo or ex vivo. In an embodiment of any of the above-delineated methods and embodiments thereof, the base editor introduces a missense mutation, inserts a new splice acceptor or splice donor site, and/or corrects a splice acceptor or splice donor site comprising a mutation. In an embodiment of any of the above-delineated methods and embodiments thereof, the polynucleotide programmable DNA binding domain is a Cas9 selected from Streptococcus pyogenes Cas9 (SpCas9), Staphylococcus aureus Cas9 (SaCas9), Streptococcus thermophilus 1 Cas9 (St1Cas9), Streptococcus canis Cas9 (ScCas9), or a variant thereof. In an embodiment, the polynucleotide programmable DNA binding domain is a wild-type or modified Streptococcus pyogenes Cas9 (SpCas9), or variant thereof. In an embodiment, the polynucleotide programmable DNA binding domain is a modified SpCas9 or a SpCas9 variant. In an embodiment, the polynucleotide programmable DNA binding domain comprises a modified SpCas9 or SpCas9 variant having an altered protospacer-adjacent motif (PAM) specificity. In an embodiment, the SpCas9 has specificity for PAM nucleic acid sequence 5′-NGC-3′ or 5′-NGG-3′. In an embodiment, the SpCas9 is a modified SpCas9 or SpCas9 variant which has specificity for PAM nucleic acid sequence 5′-NGC-3′ or a PAM nucleic acid sequence comprising 5′-NGC-3′. In an embodiment, the modified SpCas9 or SpCas9 variant comprises an amino acid sequence listed in Table 1. In an embodiment, the modified SpCas9 is SpCas9-MQKFRAER. In an embodiment, the modified SpCas9 or SpCas9 variant comprises a combination of amino acid substitutions shown in FIGS. 3A-3C, or FIG. 10. In an embodiment, the modified SpCas9 or SpCas9 variant comprises a combination of amino acid sequence substitutions selected from

### D1135M, 51136Q, G1218K, E1219F, A1322R, D1332, R1335E, and T1337R (224 SpCas9);

### D1135M, 51136Q, G1218K, E1219F, A1322R, D1332A, R1335E, and T1337R (225 SpCas9);

### D1135M, 51136Q, G1218K, E1219F, A1322R, D1332K, R1335E, and T1337R (226 SpCas9);

### D1135M, 51136Q, G1218K, E1219F, A1322R, D1332A, R1335E, and T1337Q (227 Cas9);

### D1135M, 51136Q, G1218K, E1219F, A1322R, D1332A, R1335Q, and T1337Q (230 SpCas9);

[0010] D1135M, S1136Q, G1218K, E1219F, A1322R, D1332A, R1335D, and T1337Q (235 SpCas9); D1135Q, S1136, G1218T, E1219W, A1322R, D1332, R1335N, and T1337 (237 SpCas9); D1135H, S1136, G1218S, E1219W, A1322R, D1332, R1335V, and T1337 (242 SpCas9); D1135C, S1136W, G1218N, E1219W, A1322R, D1332, R1335N, and T1337 (244 SpCas9); D113LM, S1136W, G1218R, E1219S, A1322R, D1332, R1335E, and T1337 (245 SpCas9); D1135G, S1136W, G1218S, E1219M, A1322R, D1332, R1335Q, and T1337R (259 SpCas9); L111R, D1135V, S1136Q, G1218K, E1219F, A1322R, D1332, R1335A, and T1337R (Nureki SpCas9); D1135M, S1136, S1216G, G1218, E1219, A1322, D1332A, R1335Q, and T1337 (NGC Rd1 SpCas9); or

### D1135G, S1136, S1216G, G1218, E1219, A1322R, D1332A, R1335E, and T1337R (267 (NGC Rd2 SpCas9).

[0011] In other embodiments of any of the above-delineated methods and embodiments thereof, the polynucleotide programmable DNA binding domain is a nuclease inactive or nickase variant. In an embodiment, the nickase variant comprises an amino acid substitution D10A or a corresponding amino acid substitution thereof. In an embodiment, the deaminase domain is capable of deaminating adenosine or cytosine in deoxyribonucleic acid (DNA). In an embodiment, the adenosine deaminase or cytidine deaminase is a modified adenosine deaminase or cytidine deaminase that does not occur in nature. In an embodiment, the adenosine deaminase is a TadA deaminase. In an embodiment, the TadA deaminase is TadA*7.10, TadA*8.1, TadA*8.2, TadA*8.3, TadA*8.4, TadA*8.5, TadA*8.6, TadA*8.7, TadA*8.8, TadA*8.9, TadA*8.10, TadA*8.11, TadA*8.12, TadA*8.13, TadA*8.14, TadA*8.15, TadA*8.16, TadA*8.17, TadA*8.18, TadA*8.19, TadA*8.20, TadA*8.21, TadA*8.22, TadA*8.23, or TadA*8.24. In an embodiment, the TadA*7.10 comprises one or more of the following alterations: Y147T, Y147R, Q154S, Y123H, V82S, T166R, Q154R. In an embodiment,

the TadA*7.10 comprises a combination of alterations selected from the group consisting of: Y147R+Q154R+Y123H; Y147R+Q154R+I76Y; Y147R+Q154R+T166R; Y147T+Q154R; Y147T+Q154S; V82S+Q154S; and Y123H+Y147R+Q154R+I76Y.

[0012] In another embodiment of any of the above-delineated methods and embodiments thereof, the one or more guide RNAs comprises a CRISPR RNA (crRNA) and a trans-encoded small RNA (tracrRNA), wherein the crRNA comprises a nucleic acid sequence complementary to a SBDS nucleic acid sequence comprising the alteration associated with SDS. In another embodiment of any of the above-delineated methods and embodiments thereof, the base editor is in complex with a single guide RNA (sgRNA) comprising a nucleic acid sequence complementary to an SBDS nucleic acid sequence comprising an alteration associated with SDS.

[0013] In another aspect is provided a cell produced by introducing into the cell, or a progenitor thereof: a base editor, a polynucleotide encoding the base editor, to the cell, wherein the base editor comprises a polynucleotide programmable DNA binding domain and a deaminase domain; and one or more guide polynucleotides that target the base editor to effect an alteration associated with aberrant splicing. In an embodiment, the cell or progenitor thereof is an embryonic stem cell, induced pluripotent stem cell, or hematopoietic stem cell. In an embodiment, the cell expresses an SBDS protein. In an embodiment, the cell is from a subject having Shwachman Diamond Syndrome (SDS). In an embodiment, the cell is a mammalian cell or a human cell. In an embodiment of the cell, the mutation or alteration results from a gene conversion comprising a stop codon and/or a mutation that causes aberrant splicing. In an embodiment, the cell is selected for the gene conversion associated with SDS. In an embodiment, the polynucleotide programmable DNA binding domain is a wild-type or modified Streptococcus pyogenes Cas9 (SpCas9), or variant thereof. In an embodiment, the polynucleotide programmable DNA binding domain comprises a wild-type SpCas9 or a modified SpCas9 having an altered protospacer-adjacent motif (PAM) specificity. In an embodiment, the modified SpCas9 has specificity for the nucleic acid sequence 5′-NGC-3′ or or a PAM nucleic acid sequence comprising 5′-NGC-3′. In an embodiment, the modified SpCas9 is a Cas9 variant listed in Table 1. In an embodiment, the modified SpCas9 is SpCas9-MQKFRAER. In an embodiment of the cell, the modified SpCas9 is a SpCas9 variant comprising a combination of amino acid substitutions shown in FIGS. 3A-3C, or FIG. 10. In an embodiment of the cell, the SpCas9 variant comprises a combination of amino acid sequences/substitutions selected from

### D1135M, 51136Q, G1218K, E1219F, A1322R, D1332, R1335E, and T1337R (224 SpCas9);

### D1135M, 51136Q, G1218K, E1219F, A1322R, D1332A, R1335E, and T1337R (225 SpCas9);

### D1135M, 51136Q, G1218K, E1219F, A1322R, D1332K, R1335E, and T1337R (226 SpCas9);

[0014] D1135M, 51136Q, G1218K, E1219F, A1322R, D1332A, R1335E, and T1337Q (227 Cas9);

### D1135M, 51136Q, G1218K, E1219F, A1322R, D1332A, R1335Q, and T1337Q (230 SpCas9);

[0015] D1135M, S1136Q, G1218K, E1219F, A1322R, D1332A, R1335D, and T1337Q (235 SpCas9); D1135Q, S1136, G1218T, E1219W, A1322R, D1332, R1335N, and T1337 (237 SpCas9); D1135H, S1136, G1218S, E1219W, A1322R, D1332, R1335V, and T1337 (242 SpCas9); D1135C, S1136W, G1218N, E1219W, A1322R, D1332, R1335N, and T1337 (244 SpCas9); D113LM, S1136W, G1218R, E1219S, A1322R, D1332, R1335E, and T1337 (245 SpCas9); D1135G, S1136W, G1218S, E1219M, A1322R, D1332, R1335Q, and T1337R (259 SpCas9); L111R, D1135V, S1136Q, G1218K, E1219F, A1322R, D1332, R1335A, and

### T1337R (Nureki SpCas9); D1135M, S1136, S1216G, G1218, E1219, A1322, D1332A, R1335Q, and T1337 (NGC Rd1 SpCas9); or

[0016] D1135G, S1136, S1216G, G1218, E1219, A1322R, D1332A, R1335E, and T1337R (267 (NGC Rd2 SpCas9). In embodiments of the cell, the programmable polynucleotide binding domain is a nuclease inactive variant or a nickase variant. In an embodiment, the nickase variant comprises an amino acid substitution D10A or a corresponding amino acid substitution thereof. In an embodiment of the cell, the deaminase domain is a cytidine deaminase domain capable of deaminating cytidine in deoxyribonucleic acid (DNA) or is an adenosine deaminase domain capable of deaminating adenosine in DNA. In an embodiment, the adenosine deaminase or cytidine deaminase is a modified adenosine deaminase or cytidine deaminase that does not occur in nature. In another embodiment of the cell, e adenosine deaminase is a TadA deaminase. In an embodiment, the TadA deaminase is TadA*7.10, TadA*8.1, TadA*8.2, TadA*8.3, TadA*8.4, TadA*8.5, TadA*8.6, TadA*8.7, TadA*8.8, TadA*8.9, TadA*8.10, TadA*8.11, TadA*8.12, TadA*8.13, TadA*8.14, TadA*8.15, TadA*8.16, TadA*8.17, TadA*8.18, TadA*8.19, TadA*8.20, TadA*8.21, TadA*8.22, TadA*8.23, or TadA*8.24. In an embodiment, the TadA*7.10 comprises one or more of the following alterations: Y147T, Y147R, Q154S, Y123H, V82S, T166R, Q154R. In an embodiment, the TadA*7.10 comprises a combination of alterations selected from the group consisting of: Y147R+Q154R+Y123H; Y147R+Q154R+I76Y; Y147R+Q154R+T166R; Y147T+Q154R; Y147T+Q154S; V82S+Q154S. In another embodiment of the cell, the cytosine deaminase is selected from one or more of BE4; rAPOBEC1; PpAPOBEC1; PpAPOBEC1 containing an H122A substitution; AmAPOBEC1; SsAPOBEC2; RrA3F; RrA3F containing an F130L substitution; a variant of BE4 where APOBEC-1 is replaced with the sequence of rAPOBEC1; a variant of BE4 where APOBEC-1 is replaced with the sequence of AmAPOBEC1; a variant of BE4 where APOBEC-1 is replaced with the sequence of SsAPOBEC2; a variant of BE4 where APOBEC-1 is replaced with the sequence of PpAPOBEC1; or a variant of BE4 where APOBEC-1 is replaced with the sequence of PpAPOBEC1 containing an H122A substitution. In an embodiment, the PpAPOBEC1 containing an H122A substitution, or a variant of BE4 where APOBEC-1 is replaced with the sequence of PpAPOBEC1 containing an H122A substitution, further comprises one or more amino acid mutations selected from R33A, W90F, K34A, R52A, H121A, or Y120F. In another embodiment of the cell, the one or more guide RNAs comprises a CRISPR RNA (crRNA) and a trans-encoded small RNA (tracrRNA), wherein the crRNA comprises a nucleic acid sequence complementary to a SBDS nucleic acid sequence comprising an alteration associated with SDS. In an embodiment of the cell, the base editor and the one or more guide polynucleotides forms a complex in the cell. In an embodiment, the base editor is in complex with a single guide RNA (sgRNA) comprising a nucleic acid sequence complementary to a SBDS nucleic acid sequence comprising the gene conversion associated with SDS.

[0017] In another aspect, a method of treating Shwachman Diamond Syndrome (SDS) or a disease associated with aberrant splicing in a subject in need thereof is provided, in which the method comprises administering to the subject a cell according to the above-delineated aspect and the delineated embodiments thereof. In an embodiment of the method, the cell is autologous, allogeneic, or xenogeneic to the subject.

[0018] In another aspect is provided an isolated cell or population of cells propagated or expanded from the cell according to the above-delineated aspect and the delineated embodiments thereof.

[0019] In another aspect, a method of treating Shwachman Diamond Syndrome (SDS) in a subject is provided, in which the method comprises administering to a subject in need thereof: a base editor, or a polynucleotide encoding the base editor, wherein the base editor comprises a polynucleotide programmable DNA binding domain and a deaminase domain; and one or more guide polynucleotides that target the base editor to effect an alteration of a mutation associated with SDS.

[0020] In another aspect, a method of treating a genetic disease associated with aberrant splicing in a subject is provided, in which the method comprises administering to a subject in need thereof: a base editor, or a polynucleotide encoding the base editor, wherein the base editor comprises a polynucleotide programmable DNA binding domain and a deaminase domain; and one or more guide polynucleotides that target the base editor to effect an alteration of a pathogenic mutation that alters splicing.

[0021] In an embodiment of the above-delineated method of treating Shwachman Diamond Syndrome (SDS) in a subject, or the above-delineated method of treating a genetic disease associated with aberrant splicing in a subject, the subject is a mammal or a human. In an embodiment, the above-delineated methods comprise delivering the base editor, or polynucleotide encoding the base editor, and the one or more guide polynucleotides to a cell of the subject. In an embodiment, the cell expresses a truncated polypeptide. In an embodiment of the above-delineated methods, the alteration converts a TAA stop to a TGG in a SBDS polynucleotide. In another embodiment of the methods, the alteration changes a K62X in the SBDS polypeptide associated with SDS. In another embodiment of the methods, the gene conversion associated with SDS results in expression of an SBDS polypeptide that is truncated. In another embodiment of the methods, the base editor correction replaces the Lysine (K) at amino acid position 62 with a Tryptophan (W). In another embodiment of the methods, the polynucleotide programmable DNA binding domain comprises a modified Streptococcus pyogenes Cas9 (SpCas9), or variants thereof. In another embodiment of the methods, the polynucleotide programmable DNA binding domain comprises a modified SpCas9 having an altered protospacer-adjacent motif (PAM) specificity. In an embodiment, the modified SpCas9 has specificity for the PAM nucleic acid sequence 5′-NGC-3′ or a PAM nucleic acid sequence comprising 5′-NGC-3′. In an embodiment, the modified SpCas9 is a Cas9 variant listed in Table 1. In an embodiment, the modified SpCas9 is SpCas9-MQKFRAER. In another embodiment of these methods, the modified SpCas9 is a SpCas9 variant comprising a combination of amino acid substitutions shown in FIGS. 3A-3C, or FIG. 10. In an embodiment, the SpCas9 variant comprises a combination of amino acid sequence substitutions selected from

### D1135M, 51136Q, G1218K, E1219F, A1322R, D1332, R1335E, and T1337R (224 SpCas9);

### D1135M, 51136Q, G1218K, E1219F, A1322R, D1332A, R1335E, and T1337R (225 SpCas9);

### D1135M, 51136Q, G1218K, E1219F, A1322R, D1332K, R1335E, and T1337R (226 SpCas9);

### D1135M, 51136Q, G1218K, E1219F, A1322R, D1332A, R1335E, and T1337Q (227 Cas9);

### D1135M, 51136Q, G1218K, E1219F, A1322R, D1332A, R1335Q, and T1337Q (230 SpCas9);

[0022] D1135M, 51136Q, G1218K, E1219F, A1322R, D1332A, R1335D, and T1337Q (235 SpCas9); D1135Q, S1136, G1218T, E1219W, A1322R, D1332, R1335N, and T1337 (237 SpCas9); D1135H, S1136, G1218S, E1219W, A1322R, D1332, R1335V, and T1337 (242 SpCas9); D1135C, S1136W, G1218N, E1219W, A1322R, D1332, R1335N, and T1337 (244 SpCas9); D113LM, S1136W, G1218R, E1219S, A1322R, D1332, R1335E, and T1337 (245 SpCas9); D1135G, S1136W, G1218S, E1219M, A1322R, D1332, R1335Q, and T1337R (259 SpCas9); L111R, D1135V, S1136Q, G1218K, E1219F, A1322R, D1332, R1335A, and

### T1337R (Nureki SpCas9); D1135M, S1136, S1216G, G1218, E1219, A1322, D1332A, R1335Q, and T1337 (NGC Rd1 SpCas9); or

[0023] D1135G, S1136, 51216G, G1218, E1219, A1322R, D1332A, R1335E, and T1337R (267 (NGC Rd2 SpCas9). In other embodiments of the above-delineated methods and their embodiments, the polynucleotide programmable DNA binding domain is a nuclease inactive variant. In an embodiment of the above methods, the polynucleotide programmable DNA binding domain is a nickase variant. In an embodiment, the nickase variant comprises an amino acid substitution D10A or a corresponding amino acid substitution thereof. In an embodiment of the above methods, wherein the deaminase domain is capable of deaminating adenosine or cytdine in deoxyribonucleic acid (DNA). In an embodiment, the deaminase domain is a modified adenosine deaminase or cytidine deaminase that does not occur in nature. In an embodiment, the adenosine deaminase is a TadA deaminase. In an embodiment, the TadA deaminase is TadA*7.10, TadA*8.1, TadA*8.2, TadA*8.3, TadA*8.4, TadA*8.5, TadA*8.6, TadA*8.7, TadA*8.8, TadA*8.9, TadA*8.10, TadA*8.11, TadA*8.12, TadA*8.13, TadA*8.14, TadA*8.15, TadA*8.16, TadA*8.17, TadA*8.18, TadA*8.19, TadA*8.20, TadA*8.21, TadA*8.22, TadA*8.23, or TadA*8.24. In an embodiment, the TadA*7.10 comprises one or more of the following alterations: Y147T, Y147R, Q154S, Y123H, V82S, T166R, Q154R; or wherein the TadA*7.10 comprises a combination of alterations selected from the group consisting of: Y147R+Q154R+Y123H; Y147R+Q154R+I76Y; Y147R+Q154R+T166R; Y147T+Q154R; Y147T+Q154S; V82S+Q154S; and Y123H+Y147R+Q154R+I76Y. In another embodiment of the above-delineated methods and embodiments thereof, the deaminase domain is a cytidine deaminase selected from one or more of BE4; rAPOBEC1; PpAPOBEC1; PpAPOBEC1 containing an H122A substitution; AmAPOBEC1; SsAPOBEC2; RrA3F; RrA3F containing an F130L substitution; a variant of BE4 where APOBEC-1 is replaced with the sequence of rAPOBEC1; a variant of BE4 where APOBEC-1 is replaced with the sequence of AmAPOBEC1; a variant of BE4 where APOBEC-1 is replaced with the sequence of SsAPOBEC2; a variant of BE4 where APOBEC-1 is replaced with the sequence of PpAPOBEC1; or a variant of BE4 where APOBEC-1 is replaced with the sequence of PpAPOBEC1 containing an H122A substitution. In an embodiment, the PpAPOBEC1 containing an H122A substitution, or a variant of BE4 where APOBEC-1 is replaced with the sequence of PpAPOBEC1 containing an H122A substitution, further comprises one or more amino acid mutations selected from R33A, W90F, K34A, R52A, H121A, or Y120F. In embodiment of the above-delineated methods and embodiments thereof, the base editor targets SNP rs113993993 258+2T>C in the SBDS polynucleotide sequence to restore correct splicing. In an embodiment of the above methods, the one or more guide polynucleotides comprises a CRISPR RNA (crRNA) and a trans-encoded small RNA (tracrRNA), wherein the crRNA comprises a nucleic acid sequence complementary to a SBDS nucleic acid sequence comprising a gene conversion. In an embodiment, the base editor is in complex with a single guide RNA (sgRNA) comprising a nucleic acid sequence complementary to a SBDS nucleic acid sequence comprising a gene conversion associated with SDS.

[0024] In another aspect, a method of producing a cell, or progenitor thereof is provided, in which the method comprises:

[0025] (a) introducing into an induced pluripotent stem cell comprising a gene conversion associated with Shwachman Diamond Syndrome (SDS),

[0026] a base editor, or a polynucleotide encoding the base editor, wherein the base editor comprises a polynucleotide-programmable nucleotide-binding domain and a cytidine deaminase domain or an adenosine deaminase domain; and

[0027] one or more guide polynucleotides, wherein the one or more guide polynucleotides target the base editor to effect an alteration in a mutation associated with SDS; and

[0028] (b) differentiating the induced pluripotent stem cell or progenitor into a desired cell type. In an embodiment of the method, the mutation is a gene conversion associated with SDS. In an embodiment of the method, the cell or progenitor is obtained from a subject having SDS. In an embodiment, the cell or progenitor is a mammalian cell or human cell. In another embodiment of the method, the polynucleotide programmable DNA binding domain comprises Streptococcus pyogenes Cas9 (SpCas9), a modified Streptococcus pyogenes Cas9 (SpCas9), or variant thereof. In another embodiment, the polynucleotide programmable DNA binding domain comprises a modified SpCas9 having an altered protospacer-adjacent motif (PAM) specificity. In an embodiment of the method, the SpCas9 has specificity for the nucleic acid sequence 5′-NGG-3′ and the modified SpCas9 has specificity for the nucleic acid sequence 5′-NGC-3′ or a PAM nucleic acid sequence comprising 5′-NGC-3′. In an embodiment of the method, the modified SpCas9 is a Cas9 variant listed in Table 1 or the modified SpCas9 is SpCas9-MQKFRAER. In another embodiment of the method, the modified SpCas9 is a SpCas9 variant comprises a combination of amino acid substitutions shown in FIGS. 3A-3C, or FIG. 10. In an embodiment of the method, the SpCas9 variant comprises a combination of amino acid sequence substitutions selected from

### D1135M, 51136Q, G1218K, E1219F, A1322R, D1332, R1335E, and T1337R (224 SpCas9);

### D1135M, 51136Q, G1218K, E1219F, A1322R, D1332A, R1335E, and T1337R (225 SpCas9);

### D1135M, 51136Q, G1218K, E1219F, A1322R, D1332K, R1335E, and T1337R (226 SpCas9);

### D1135M, 51136Q, G1218K, E1219F, A1322R, D1332A, R1335E, and T1337Q (227 Cas9);

### D1135M, 51136Q, G1218K, E1219F, A1322R, D1332A, R1335Q, and T1337Q (230 SpCas9);

[0029] D1135M, 51136Q, G1218K, E1219F, A1322R, D1332A, R1335D, and T1337Q (235 SpCas9); D1135Q, S1136, G1218T, E1219W, A1322R, D1332, R1335N, and T1337 (237 SpCas9); D1135H, S1136, G1218S, E1219W, A1322R, D1332, R1335V, and T1337 (242 SpCas9); D1135C, S1136W, G1218N, E1219W, A1322R, D1332, R1335N, and T1337 (244 SpCas9); D113LM, S1136W, G1218R, E1219S, A1322R, D1332, R1335E, and T1337 (245 SpCas9); D1135G, S1136W, G1218S, E1219M, A1322R, D1332, R1335Q, and T1337R (259 SpCas9); L111R, D1135V, 51136Q, G1218K, E1219F, A1322R, D1332, R1335A, and

### T1337R (Nureki SpCas9); D1135M, S1136, 51216G, G1218, E1219, A1322, D1332A, R1335Q, and T1337 (NGC Rd1 SpCas9); or

[0030] D1135G, S1136, 51216G, G1218, E1219, A1322R, D1332A, R1335E, and T1337R (267 (NGC Rd2 SpCas9). In an embodiment of the method, the polynucleotide programmable DNA binding domain is a nuclease inactive or nickase variant. In an embodiment, the nickase variant comprises an amino acid substitution D10A or a corresponding amino acid substitution thereof. In an embodiment of the method, the adenosine deaminase domain is capable of deaminating adenosine in deoxyribonucleic acid (DNA) and the cytidine deaminase domain is capable of deaminating cytosine in deoxyribonucleic acid (DNA). In an embodiment, the adenosine deaminase is a modified adenosine deaminase that does not occur in nature. In an embodiment, the adenosine deaminase is a TadA deaminase selected from TadA*7.10, TadA*8.1, TadA*8.2, TadA*8.3, TadA*8.4, TadA*8.5, TadA*8.6, TadA*8.7, TadA*8.8, TadA*8.9, TadA*8.10, TadA*8.11, TadA*8.12, TadA*8.13, TadA*8.14, TadA*8.15, TadA*8.16, TadA*8.17, TadA*8.18, TadA*8.19, TadA*8.20, TadA*8.21, TadA*8.22, TadA*8.23, or TadA*8.24. In another embodiment of the method, the deaminase domain is a cytidine deaminase selected from one or more of BE4; rAPOBEC1; PpAPOBEC1; PpAPOBEC1 containing an H122A substitution; AmAPOBEC1; SsAPOBEC2; RrA3F; RrA3F containing an F130L substitution; a variant of BE4 where APOBEC-1 is replaced with the sequence of rAPOBEC1; a variant of BE4 where APOBEC-1 is replaced with the sequence of AmAPOBEC1; a variant of BE4 where APOBEC-1 is replaced with the sequence of SsAPOBEC2; a variant of BE4 where APOBEC-1 is replaced with the sequence of PpAPOBEC1; or a variant of BE4 where APOBEC-1 is replaced with the sequence of PpAPOBEC1 containing an H122A substitution. In an embodiment, the PpAPOBEC1 containing an H122A substitution, or a variant of BE4 where APOBEC-1 is replaced with the sequence of PpAPOBEC1 containing an H122A substitution, further comprises one or more amino acid mutations selected from R33A, W90F, K34A, R52A, H121A, or Y120F. In an embodiment of the method, the one or more guide polynucleotides comprises a CRISPR RNA (crRNA) and a trans-encoded small RNA (tracrRNA), wherein the crRNA comprises a nucleic acid sequence complementary to a SBDS nucleic acid sequence comprising the gene conversion associated with SDS. In an embodiment of the method, the base editor and the one or more guide polynucleotides form a complex in the cell. In an embodiment of the method, the base editor is in complex with a single guide RNA (sgRNA) comprising a nucleic acid sequence complementary to a SBDS nucleic acid sequence comprising the gene conversion associated with SDS.

[0031] In another aspect, a guide RNA is provided, which comprises a nucleic acid sequence from 5′ to 3′, or a 1, 2, 3, 4, or 5 nucleotide 5′ truncation fragment thereof, selected from one or more of: GUAAGCAGGCGGGUAACAGC; AGCAGGCGGGUAACAGCUGC; GCGGGUAACAGCUGCAGCAU; UGUAAAUGUUUCCUAAGGUC; AAUGUUUCCUAAGGUCAGGU, GCAGGCGGGUAACAGCUGC, CAGGCGGGUAACAGCUGC, AGGCGGGUAACAGCUGC, and AAGCAGGCGGGUAACAGCUGC.

[0032] In another aspect, a base editor system for editing a pathogenic mutation in an SBDS gene is provided, in which the base editor system comprises:
[0033] (a) a base editor comprising:
   [0034] (i) a polynucleotide-programmable DNA-binding domain, and
   [0035] (ii) a deaminase domain capable of deaminating a polynucleotide present in the SBDS gene conversion or its complement nucleobase; and
[0036] (b) a guide polynucleotide in conjunction with the polynucleotide-programmable DNA-binding domain, wherein the guide polynucleotide targets the base editor to a target polynucleotide sequence at least a portion of which is located in the SBDS gene, an SBDS pseudo gene, or a reverse complement thereof;

[0037] wherein deaminating a polynucleotide or its complementary nucleobase permits transcription of the SBDS gene.

[0038] In another aspect, a base editor system for editing a mutation in a gene that results in aberrant splicing is provided, in which the base editor system comprises:
[0039] (a) a base editor comprising:
   [0040] (i) a polynucleotide-programmable DNA-binding domain, and
   [0041] (ii) a deaminase domain capable of deaminating a mutation or its complement nucleobase that results in aberrant splicing; and
[0042] (b) a guide polynucleotide in conjunction with the polynucleotide-programmable DNA-binding domain, wherein the guide polynucleotide targets the base editor to a target polynucleotide sequence at least a portion of which is located in the gene or its reverse complement;

[0043] wherein deaminating the mutation or its complement nucleobase permits transcription.

[0044] In another aspect, a method of editing a pathogenic mutation in a gene that results in aberrant splicing is provided, in which the method comprises:

[0045] contacting a target nucleotide sequence, at least a portion of which is located in the gene or its reverse complement, with a base editor comprising:
[0046] (i) a polynucleotide-programmable DNA-binding domain in conjunction with a guide polynucleotide that targets the base editor to the target polynucleotide sequence, at least a portion of which is located in the gene or its reverse complement, and
[0047] (ii) a deaminase domain capable of deaminating the pathogenic mutation that results in aberrant splicing or its complement nucleobase; and

[0048] editing the pathogenic mutation by deaminating the pathogenic mutation or its complement nucleobase upon targeting of the base editor to the target nucleotide sequence,

[0049] wherein deaminating the pathogenic mutation or its complement nucleobase results in a conversion of the pathogenic mutation to a sequence that permits splicing, thereby correcting the pathogenic mutation.

[0050] In another aspect, a method of editing a pathogenic mutation in an SBDS gene is provided, in which the method comprises:

[0051] contacting a target nucleotide sequence, at least a portion of which is located in the gene or its reverse complement, with a base editor comprising:
[0052] (i) a polynucleotide-programmable DNA-binding domain in conjunction with a guide polynucleotide that targets the base editor to the target polynucleotide sequence, at least a portion of which is located in the gene or its reverse complement, and
[0053] (ii) a deaminase domain capable of deaminating the pathogenic mutation or its complement nucleobase; and

[0054] editing the pathogenic mutation by deaminating the pathogenic mutation or its complement nucleobase upon targeting of the base editor to the target nucleotide sequence,

[0055] wherein deaminating the pathogenic mutation or its complement nucleobase permits splicing, thereby editing a pathogenic mutation in an SBDS gene. In an embodiment of the above-delineated methods of editing a pathogenic mutation, the pathogenic mutation in SBDS results from a gene conversion. In an embodiment, the pathogenic mutation introduces a stop codon or alters splicing of the gene. In an embodiment, the pathogenic mutation encodes a polypeptide having a truncation. In an embodiment, the base editor introduces a missense mutation, inserts a new splice acceptor or splice donor site, or corrects a splice acceptor or splice donor site comprising a mutation. In an embodiment, the base editor corrects a splice donor SNP site comprising a mutation in rs113993993 C→T in the SBDS gene.

[0056] In another aspect, a method of treating SDS in a subject by editing a pathogenic mutation in an SBDS gene is provided, in which the method comprises:

[0057] administering a base editor, or a polynucleotide encoding the base editor, to a subject in need thereof, wherein the base editor comprises:
[0058] (i) a polynucleotide-programmable DNA-binding domain, and
[0059] (ii) a deaminase domain capable of deaminating a nucleobase within the pathogenic mutation or its complement nucleobase; and

[0060] administering a guide polynucleotide to the subject, wherein the guide polynucleotide targets the base editor to a target nucleotide sequence at least a portion of which is located in the gene or its reverse complement; and

[0061] editing the pathogenic mutation in an SBDS geneby deaminating the pathogenic mutation or its complement nucleobase upon targeting of the base editor to the target nucleotide sequence,

[0062] wherein deaminating the pathogenic mutation or its complement nucleobase permits transcription or corrects the pathogenic mutation.

[0063] In another aspect, a method of producing a cell, tissue, or organ for treating SDS in a subject in need thereof by correcting a pathogenic mutation in an SBDS gene of the cell, tissue, or organ is provided, in which the method comprises:

[0064] contacting the cell, tissue, or organ with a base editor, wherein the base editor comprises:
[0065] (i) a polynucleotide-programmable DNA-binding domain, and
[0066] (ii) a deaminase domain capable of deaminating the pathogenic mutation or its complement nucleobase; and

[0067] contacting the cell, tissue, or organ with a guide polynucleotide, wherein the guide polynucleotide targets the base editor to a target nucleotide sequence at least a portion of which is located in the gene or its reverse complement; and

[0068] editing the pathogenic mutation by deaminating the mutation or its complement nucleobase upon targeting of the base editor to the target nucleotide sequence,

[0069] wherein deaminating the pathogenic mutation or its complement nucleobase permits splicing, thereby producing the cell, tissue, or organ for treating SDS. In an embodiment, the mutation results from a gene conversion. In another embodiment, the mutation associated with Shwachman Diamond Syndrome introduces a stop codon or alters splicing of the gene. In another embodiment, the mutation associated with Shwachman Diamond Syndrome (SDS) encodes an SBDS polypeptide having a truncation. In another embodiment, the base editor introduces a missense mutation, inserts a new splice acceptor or splice donor site, or corrects a splice acceptor or splice donor site comprising a mutation. In another embodiment, the method comprises administering the cell, tissue, or organ to the subject. In an embodiment of the method, the cell, tissue, or organ is autologous, allogeneic, or xenogeneic to the subject. In another embodiment of the method, the deaminase domain is a cytidine deaminase domain or an adenosine deaminase domain. In an embodiment, the adenosine deaminase domain is capable of deaminating adenine in deoxyribonucleic acid (DNA) and the cytidine deaminase is capable of deaminating cytosine in DNA.

[0070] In an embodiment of any of the above-delineated base editor system, or methods of editing, or methods of treating, and embodiments thereof, the guide polynucleotide comprises ribonucleic acid (RNA), or deoxyribonucleic acid (DNA). In an embodiment of any of the above-delineated base editor system, or methods of editing, or methods of treating, and embodiments thereof, the guide polynucleotide comprises a CRISPR RNA (crRNA) sequence, a trans-activating CRISPR RNA (tracrRNA) sequence, or a combination thereof, wherein the crRNA comprises a nucleic acid sequence complementary to a SBDS nucleic acid sequence comprising the alteration associated with SDS. In an embodiment of any of the above-delineated base editor system, or methods of editing, or methods of treating, and embodiments thereof, the base editor system or methods further comprise a second guide polynucleotide. In an embodiment, the second guide polynucleotide comprises ribonucleic acid (RNA), or deoxyribonucleic acid (DNA). In another embodiment, the second guide polynucleotide comprises a CRISPR RNA (crRNA) sequence, a trans-activating CRISPR RNA (tracrRNA) sequence, or a combination thereof. In an embodiment of any of the above-delineated base editor system, or methods of editing, or methods of treating, and embodiments thereof, the polynucleotide-programmable DNA-binding domain is nuclease dead or is a nickase. In an embodiment of any of the above-delineated base editor system, or methods of editing, or methods of treating, and embodiments thereof, the polynucleotide-programmable DNA-binding domain comprises a Cas9 domain. In an embodiment, the Cas9 domain comprises a nuclease dead Cas9 (dCas9), a Cas9 nickase (nCas9), or a nuclease active Cas9. In an embodiment, the Cas9 domain comprises a Cas9 nickase. In an embodiment of any of the above-delineated base editor system, or methods of editing, or methods of treating, and embodiments thereof, the polynucleotide-programmable DNA-binding domain is an engineered or a modified polynucleotide-programmable DNA-binding domain. In an embodiment of any of the above-delineated base editor system, or methods of editing, or methods of treating, and embodiments thereof, the editing results in less than 20% indel formation, less than 15% indel formation, less than 10% indel formation; less than 5% indel formation; less than 4% indel formation; less than 3% indel formation; less than 2% indel formation; less than 1% indel formation; less than 0.5% indel formation; or less than 0.1% indel formation. In an embodiment of any of the above-delineated base editor system, or methods of editing, or methods of treating, and embodiments thereof, the editing does not result in translocations. In an embodiment of any of the above-delineated base editor system, or methods of editing, or methods of treating, and embodiments thereof, the base editor corrects a splice donor SNP site comprising a mutation in rs113993993 C→T in the SBDS gene.

[0071] In another aspect, a method of treating Shwachman Diamond Syndrome (SDS) in a subject in need thereof is provided, in which the method comprises administering to the subject the cell of the above-delineated aspect and embodiments thereof.

[0072] In an embodiment of any of the above-delineated methods and the embodiments thereof, the above-delineated cell and embodiments thereof, or the above-delineated base editor system and embodiments thereof, or the above-delineated methods of editing, treating, producing a cell, tissue, etc., and the embodiments thereof, the base editor and/or components thereof are encoded by mRNA. In another embodiment of any of the above-delineated methods and the embodiments thereof, the above-delineated cell and embodiments thereof, or the above-delineated base editor system and embodiments thereof, or the above-delineated methods of editing, treating, producing a cell, tissue, etc., and the embodiments thereof, the base editor system or the method of any one of claims 126-157, wherein the base editor is in complex with a single guide RNA (sgRNA) comprising a nucleic acid sequence complementary to an SBDS nucleic acid sequence. In an embodiment, the sgRNA comprises a nucleic acid sequence comprising at least 10 contiguous nucleotides that are complementary to the SBDS nucleic acid sequence. In another embodiment, the sgRNA comprises a nucleic acid sequence comprising 15, 16, 17, 18, 19, 20, 21, 22, 23, 24, 25, 26, 27, 28, 29, 30, 31, 32, 33, 34, 35, 36, 37, 38, 39, or 40 contiguous nucleotides that are complementary to the SBDS nucleic acid sequence. In another embodiment, the sgRNA comprises a nucleic acid sequence comprising 18, 19, or 20 contiguous nucleotides that are complementary to the SBDS nucleic acid sequence

[0073] In another aspect, a composition is provided, in which the composition comprises a base editor bound to a guide RNA, wherein the guide RNA comprises a nucleic acid sequence that is complementary to an SBDS gene associated with Shwachman Diamond Syndrome (SDS). In an embodiment, the base editor comprises an adenosine deaminase or a cytidine deaminase. In an embodiment, the adenosine deaminase is capable of deaminating adenine in deoxyribonucleic acid (DNA). In an embodiment, the adenosine deaminase is a TadA deaminase selected from one or more of TadA*7.10, TadA*8.1, TadA*8.2, TadA*8.3, TadA*8.4, TadA*8.5, TadA*8.6, TadA*8.7, TadA*8.8, TadA*8.9, TadA*8.10, TadA*8.11, TadA*8.12, TadA*8.13, TadA*8.14, TadA*8.15, TadA*8.16, TadA*8.17, TadA*8.18, TadA*8.19, TadA*8.20, TadA*8.21, TadA*8.22, TadA*8.23, or TadA*8.24. In an embodiment, the cytidine deaminase is capable of deaminating cytidine in deoxyribonucleic acid (DNA). In another embodiment, the cytidine deaminase is APOBEC, A3F, or a derivative thereof. In an embodiment of the composition, the base editor

[0074] (i) comprises a Cas9 nickase;

[0075] (ii) comprises a nuclease inactive Cas9;

[0076] (iii) comprises an SpCas9 variant comprising a combination of amino acid substitutions shown in FIGS. 3A-3C, or FIG. 10;

[0077] (iv) comprises an SpCas9 variant comprising a combination of amino acid sequence substitutions selected from

### D1135M, 51136Q, G1218K, E1219F, A1322R, D1332, R1335E, and T1337R (224 SpCas9);

### D1135M, 51136Q, G1218K, E1219F, A1322R, D1332A, R1335E, and T1337R (225 SpCas9);

### D1135M, 51136Q, G1218K, E1219F, A1322R, D1332K, R1335E, and T1337R (226 SpCas9);

### D1135M, 51136Q, G1218K, E1219F, A1322R, D1332A, R1335E, and T1337Q (227 Cas9);

### D1135M, 51136Q, G1218K, E1219F, A1322R, D1332A, R1335Q, and T1337Q (230 SpCas9);

[0078] D1135M, 51136Q, G1218K, E1219F, A1322R, D1332A, R1335D, and T1337Q (235 SpCas9); D1135Q, S1136, G1218T, E1219W, A1322R, D1332, R1335N, and T1337 (237 SpCas9); D1135H, S1136, G1218S, E1219W, A1322R, D1332, R1335V, and T1337 (242 SpCas9); D1135C, S1136W, G1218N, E1219W, A1322R, D1332, R1335N, and T1337 (244 SpCas9); D113LM, S1136W, G1218R, E1219S, A1322R, D1332, R1335E, and T1337 (245 SpCas9); D1135G, S1136W, G1218S, E1219M, A1322R, D1332, R1335Q, and T1337R (259 SpCas9); L111R, D1135V, 51136Q, G1218K, E1219F, A1322R, D1332, R1335A, and T1337R (Nureki SpCas9); D1135M, S1136, 51216G, G1218, E1219, A1322, D1332A, R1335Q, and T1337 (NGC Rd1 SpCas9); or

### D1135G, S1136, 51216G, G1218, E1219, A1322R, D1332A, R1335E, and T1337R (267 (NGC Rd2 SpCas9).

[0079] (v) does not comprise a UGI domain; and/or

[0080] (vi) comprises a cytidine deaminase selected from BE4; rAPOBEC1; PpAPOBEC1; PpAPOBEC1 containing an H122A substitution; AmAPOBEC1; SsAPOBEC2; RrA3F; RrA3F containing an F130L substitution; a variant of BE4 where APOBEC-1 is replaced with the sequence of rAPOBEC1; a variant of BE4 where APOBEC-1 is replaced with the sequence of AmAPOBEC1; a variant of BE4 where APOBEC-1 is replaced with the sequence of SsAPOBEC2; a variant of BE4 where APOBEC-1 is replaced with the sequence of PpAPOBEC1; or a variant of BE4 where APOBEC-1 is replaced with the sequence of PpAPOBEC1 containing an H122A substitution. In an embodiment of the composition, in (vi), the PpAPOBEC1 containing an H122A substitution, or a variant of BE4 where APOBEC-1 is replaced with the sequence of PpAPOBEC1 containing an H122A substitution, further comprises one or more amino acid mutations selected from R33A, W90F, K34A, R52A, H121A, or Y120F. In an embodiment, the composition further comprises a pharmaceutically acceptable excipient, diluent, or carrier.

[0081] In another aspect, a pharmaceutical composition for the treatment of Shwachman Diamond Syndrome (SDS) is provided, in which the pharmaceutical composition comprises the composition of the above-delineated aspect and embodiments, and comprising the a pharmaceutically acceptable excipient, diluent, or carrier. In an embodiment of the pharmaceutical composition, the gRNA and the base editor are formulated together or separately. In an embodiment of the pharmaceutical composition, the gRNA comprises a nucleic acid sequence, from 5′ to 3′, or a 1, 2, 3, 4, or 5 nucleotide 5′ truncation fragment thereof, selected from one or more of GUAAGCAGGCGGGUAACAGC; AGCAGGCGGGUAACAGCUGC; GCGGGUAACAGCUGCAGCAU; UGUAAAUGUUUCCUAAGGUC; AAUGUUUCCUAAGGUCAGGU, GCAGGCGGGUAACAGCUGC, CAGGCGGGUAACAGCUGC, AGGCGGGUAACAGCUGC, and AAGCAGGCGGGUAACAGCUGC. In an embodiment, the pharmaceutical composition further comprises a vector suitable for expression in a mammalian cell, wherein the vector comprises a polynucleotide encoding the base editor. In an embodiment of the pharmaceutical composition, the polynucleotide encoding the base editor is mRNA. In an embodiment of the pharmaceutical composition, the vector is a viral vector. In an embodiment, the viral vector is a retroviral vector, adenoviral vector, lentiviral vector, herpesvirus vector, or adeno-associated viral vector (AAV). In an embodiment, the pharmaceutical composition further comprises a ribonucleoparticle suitable for expression in a mammalian cell.

[0082] In an aspect, a pharmaceutical composition is provided in which the pharmaceutical composition comprises (i) a nucleic acid encoding a base editor; and (ii) the guide RNA of the above-delineated aspect, such as a guide RNA comprising a nucleic acid sequence from 5′ to 3′, or a 1, 2, 3, 4, or 5 nucleotide 5′ truncation fragment thereof, selected from one or more of: GUAAGCAGGCGGGUAACAGC; AGCAGGCGGGUAACAGCUGC; GCGGGUAACAGCUGCAGCAU; UGUAAAUGUUUCCUAAGGUC; AAUGUUUCCUAAGGUCAGGU, GCAGGCGGGUAACAGCUGC, CAGGCGGGUAACAGCUGC, AGGCGGGUAACAGCUGC, and AAGCAGGCGGGUAACAGCUGC. In an embodiment of the pharmaceutical composition of any one of the above-delineated aspects and embodiments thereof, the pharmaceutical composition further comprises a lipid.

[0083] In an aspect, a method of treating Shwachman Diamond Syndrome (SDS) is provided, in which the method comprises administering to a subject in need thereof the pharmaceutical composition of any one of the above-delineated aspect and embodiments thereof.

[0084] In an aspect, use of the pharmaceutical composition of any one of the above-delineated aspect and embodiments thereof in the treatment of Shwachman Diamond Syndrome (SDS) in a subject is provided. In an embodiment of the use, the subject is a human.

### Definitions

[0085] The following definitions supplement those in the art and are directed to the current application and are not to be imputed to any related or unrelated case, e.g., to any commonly owned patent or application. Although any methods and materials similar or equivalent to those described herein can be used in the practice for testing of the present disclosure, the preferred materials and methods are described herein. Accordingly, the terminology used herein is for the purpose of describing particular embodiments only, and is not intended to be limiting.

[0086] Unless defined otherwise, all technical and scientific terms used herein have the meaning commonly understood by a person skilled in the art to which this invention belongs. The following references provide one of skill with a general definition of many of the terms used in this invention: Singleton et al., Dictionary of Microbiology and Molecular Biology (2nd ed. 1994); The Cambridge Dictionary of Science and Technology (Walker ed., 1988); The Glossary of Genetics, 5th Ed., R. Rieger et al. (eds.), Springer Verlag (1991); and Hale & Marham, The Harper Collins Dictionary of Biology (1991). As used herein, the following terms have the meanings ascribed to them below, unless specified otherwise.

[0087] In this application, the use of the singular includes the plural unless specifically stated otherwise. It must be noted that, as used in the specification, the singular forms “a,” “an” and “the” include plural referents unless the context clearly dictates otherwise. In this application, the use of “or” means “and/or” unless stated otherwise. Furthermore, use of the term “including” as well as other forms, such as “include”, “includes,” and “included,” is not limiting.

[0088] As used in this specification and claim(s), the words “comprising” (and any form of comprising, such as “comprise” and “comprises”), “having” (and any form of having, such as “have” and “has”), “including” (and any form of including, such as “includes” and “include”) or “containing” (and any form of containing, such as “contains” and “contain”) are inclusive or open-ended and do not exclude additional, unrecited elements or method steps. It is contemplated that any embodiment discussed in this specification can be implemented with respect to any method or composition of the present disclosure, and vice versa. Furthermore, compositions of the present disclosure can be used to achieve methods of the present disclosure.

[0089] The term “about” or “approximately” means within an acceptable error range for the particular value as determined by one of ordinary skill in the art, which will depend in part on how the value is measured or determined, i.e., the limitations of the measurement system. For example, “about” can mean within 1 or more than 1 standard deviation, per the practice in the art. Alternatively, “about” can mean a range of up to 20%, up to 10%, up to 5%, or up to 1% of a given value. Alternatively, particularly with respect to biological systems or processes, the term can mean within an order of magnitude, e.g., within 5-fold, within 2-fold of a value. Where particular values are described in the application and claims, unless otherwise stated, the term “about” means within an acceptable error range for the particular value should be assumed.

[0090] Reference in the specification to “some embodiments,” “an embodiment,” “one embodiment” or “other embodiments” means that a particular feature, structure, or characteristic described in connection with the embodiments is included in at least some embodiments, but not necessarily all embodiments, of the present disclosures.

[0091] By “adenosine deaminase” is meant a polypeptide or fragment thereof capable of catalyzing the hydrolytic deamination of adenine or adenosine. In some embodiments, the deaminase or deaminase domain is an adenosine deaminase catalyzing the hydrolytic deamination of adenosine to inosine or deoxy adenosine to deoxyinosine. In some embodiments, the adenosine deaminase catalyzes the hydrolytic deamination of adenine or adenosine in deoxyribonucleic acid (DNA). The adenosine deaminases (e.g., engineered adenosine deaminases, evolved adenosine deaminases) provided herein may be from any organism, such as a bacterium.

[0092] In some embodiments, the deaminase or deaminase domain is a variant of a naturally-occurring deaminase from an organism. In some embodiments, the deaminase or deaminase domain does not occur in nature. For example, in some embodiments, the deaminase or deaminase domain is at least 50%, at least 55%, at least 60%, at least 65%, at least 70%, at least 75% at least 80%, at least 85%, at least 90%, at least 95%, at least 96%, at least 97%, at least 98%, at least 99%, or at least 99.5% identical to a naturally-occurring deaminase. In some embodiments, the adenosine deaminase is from a bacterium, such as, E. coli, S. aureus, S. typhi, S. putrefaciens, H influenzae, or C. crescentus. In some embodiments, the adenosine deaminase is a TadA deaminase. In some embodiments, the TadA deaminase is an E. coli TadA (ecTadA) deaminase or a fragment thereof.

[0093] In some embodiments, the adenosine deaminase comprises an alteration in the following sequence:

MSEVEFSHEYTNMRHALTLAKRARDEREVPVGAVL
VLNNRVIGEGTNNRAIGLHDPTAHAEIMALRQGGL
VMQNYRLIDATLYVTFEPCVMCAGAMIHSRIGRVV
FGVRNAKTGAAGSLMDVLHYPGMNHRVEITEGILA
DECAALLCYFFRMPRQVFNAQKKAQSSTD
(also termed TadA* 7.10).

[0094] In some embodiments, TadA*7.10 comprises an alteration at amino acid 82 or 166. In particular embodiments, a variant of the above-referenced sequence comprises one or more of the following alterations: Y147T, Y147R, Q154S, Y123H, V82S, T166R, and Q154R. The alteration Y123H refers to the alteration H123Y in TadA*7.10 reverted back to Y123H TadA (wt). In other embodiments, a variant of the TadA*7.10 sequence comprises a combination of alterations selected from the group consisting of Y147R+Q154R+Y123H; Y147R+Q154R+I76Y; Y147R+Q154R+T166R; Y147T+Q154R; Y147T+Q154S; V82S+Q154S; and Y123H+Y147R+Q154R+I76Y.

[0095] In other embodiments, the invention provides adenosine deaminase variants that include deletions, e.g., TadA*8, comprising a deletion of the C-terminus beginning at residue 149, 150, 151, 152, 153, 154, 155, 156, or 157. In other embodiments, the adenosine deaminase variant is a TadA monomer (e.g., TadA*8) comprising one or more of the following alterations: Y147T, Y147R, Q154S, Y123H, V82S, T166R, Q154R. In other embodiments, the adenosine deaminase variant is a monomer comprising the following alterations: Y147R+Q154R+Y123H; Y147R+Q154R+I76Y; Y147R+Q154R+T166R; Y147T+Q154R; Y147T+Q154S; V82S+Q154S; and Y123H+Y147 R+Q154R+I76Y. In still other embodiments, the adenosine deaminase variant is a homodimer comprising two adenosine deaminase domains each having one or more of the following alterations Y147T, Y147R, Q154S, Y123H, V82S, T166R, Q154R. In other embodiments, the adenosine deaminase variant is a heterodimer comprising a wild-type adenosine deaminase domain or a TadA*7.10 domain and an adenosine deaminase variant domain (e.g., TadA*8) comprising one or more of the following alterations Y147T, Y147R, Q154S, Y123H, V82S, T166R, Q154R. In other embodiments, the adenosine deaminase variant is a heterodimer comprising a TadA*7.10 domain and an adenosine deaminase variant of TadA*7.10 (e.g., TadA*8) comprising the following alterations: Y147R+Q154R+Y123H; Y147R+Q154R+I76Y; Y147R+Q154R+T166R; Y147T+Q154R; Y147T+Q154S; V82S+Q154S; and Y123H+Y147R+Q154R+176Y.

[0096] In one embodiment, the adenosine deaminase is a TadA*8 that comprises or consists essentially of the following sequence or a fragment thereof having adenosine deaminase activity:

MSEVEFSHEYTNMRHALTLAKRARDEREVPVGAVL
VLNNRVIGEGTNNRAIGLHDPTAHAEIMALRQGGL
VMQNYRLIDATLYVTFEPCVMCAGAMIHSRIGRVV
FGVRNAKTGAAGSLMDVLHYPGMNHRVEITEGILA
DECAALLCTFFRMPRQVFNAQKKAQSSTD.

[0097] In some embodiments, the TadA*8 is truncated. In some embodiments, the truncated TadA*8 is missing 1, 2, 3, 4, 5, 6, 7, 8, 9, 10, 11, 12, 13, 14, 15, 6, 17, 18, 19, or 20 N-terminal amino acid residues relative to the full length TadA*8. In some embodiments, the truncated TadA*8 is missing 1, 2, 3, 4, 5, 6, 7, 8, 9, 10, 11, 12, 13, 14, 15, 6, 17, 18, 19, or 20 C-terminal amino acid residues relative to the full length TadA*8. In some embodiments the adenosine deaminase variant is a full-length TadA*8.

[0098] In particular embodiments, an adenosine deaminase heterodimer comprises an TadA*8 domain and an adenosine deaminase domain selected from one of the following:

Staphylococcus aureus (S. aureus) TadA:
MGSHMTNDIYFMTLAIEEAKKAAQLGEVPIGAIIT
KDDEVIARAHNLRETLQQPTAHAEHIAIERAAKVL
GSWRLEGCTLYVTLEPCVMCAGTIVMSRIPRVVYG
ADDPKGGCSGSLMNLLQQSNFNHRAIVDKGVLKEA
CSTLLTTFFKNLRANKKSTN
Bacillus subtilis (B. subtilis) TadA:
MTQDELYMKEAIKEAKKAEEKGEVPIGAVLVINGE
IIARAHNLRETEQRSIAHAEMLVIDEACKALGTWR
LEGATLYVTLEPCPMCAGAVVLSRVEKVVFGAFDP
KGGCSGTLMNLLQEERFNHQAEVVSGVLEEECGGM
LSAFFRELRKKKKAARKNLSE
Salmonella typhimurium (S. typhimurium) TadA:
MPPAFITGVTSLSDVELDHEYWMRHALTLAKRAWD
EREVPVGAVLVHNHRVIGEGWNRPIGRHDPTAHAE
IMALRQGGLVLQNYRLLDTTLYVTLEPCVMCAGAM
VHSRIGRVVFGARDAKTGAAGSLIDVLHHPGMNHR
VEIIEGVLRDECATLLSDFFRMRRQEIKALKKADR
AEGAGPAV
Shewanella putrefaciens (S. putrefaciens) TadA:
MDEYWMQVAMQMAEKAEAAGEVPVGAVLVKDGQQI
ATGYNLSISQHDPTAHAEILCLRSAGKKLENYRLL
DATLYITLEPCAMCAGAMVHSRIARVVYGARDEKT
GAAGTVVNLLQHPAFNHQVEVTSGVLAEACSAQLS
RFFKRRRDEKKALKLAQRAQQGIE
Haemophilus influenzae F3031
(H. influenzae) TadA:
MDAAKVRSEFDEKMMRYALELADKAEALGEIPVGA
VLVDDARNIIGEGWNLSIVQSDPTAHAEIIALRNG
AKNIQNYRLLNSTLYVTLEPCTMCAGAILHSRIKR
LVFGASDYKTGAIGSRFHFFDDYKNINHTLEITSG
VLAEECSQKLSTFFQKRREEKKIEKALLKSLSDK
Caulobacter crescentus (C. crescentus) TadA:
MRTDESEDQDHRMMRLALDAARAAAEAGETPVGAV
ILDPSTGEVIATAGNGPIAAHDPTAHAEIAAMRAA
AAKLGNYRLTDLTLVVTLEPCAMCAGAISHARIGR
VVFGADDPKGGAVVHGPKFFAQPTCHWRPEVTGGV
LADESADLLRGFFRARRKAKI
Geobacter sulfurreducens (G. sulfurreducens)
TadA:
MSSLKKTPIRDDAYWMGKAIREAAKAAARDEVPIG
AVIVRDGAVIGRGHNLREGSNDPSAHAEMIAIRQA
ARRSANWRLTGATLYVTLEPCLMCMGAIILARLER
VVFGCYDPKGGAAGSLYDLSADPRLNHQVRLSPGV
CQEECGTMLSDFFRDLRRRKKAKATPALFIDERKV
PPEP
TadA* 7.10
MSEVEFSHEYWMRHALTLAKRARDEREVPVGAVLV
LNNRVIGEGWNRAIGLHDPTAHAEIMALRQGGLVM
QNYRLIDATLYVTFEPCVMCAGAMIHSRIGRVVFG
VRNAKTGAAGSLMDVLHYPGMNHRVEITEGILADE
CAALLCYFFRMPRQVFNAQKKAQSSTD.

[0099] “Administering” is referred to herein as providing one or more compositions described herein to a patient or a subject. By way of example and without limitation, composition administration, e.g., injection, can be performed by intravenous (i.v.) injection, sub-cutaneous (s.c.) injection, intradermal (i.d.) injection, intraperitoneal (i.p.) injection, or intramuscular (i.m.) injection. One or more such routes can be employed. Parenteral administration can be, for example, by bolus injection or by gradual perfusion over time. Alternatively, or concurrently, administration can be by an oral route.

[0100] By “agent” is meant any small molecule chemical compound, antibody, nucleic acid molecule, or polypeptide, or fragments thereof.

[0101] By “alteration” is meant a change (increase or decrease) in the sequence, expression levels, or activity of a gene or polypeptide as detected by standard art known methods, such as those described herein. As used herein, an alteration includes a 10% change in expression levels, a 25% change, a 40% change, and a 50% or greater change in expression levels.

[0102] By “ameliorate” is meant decrease, suppress, attenuate, diminish, arrest, or stabilize the development or progression of a disease.

[0103] By “analog” is meant a molecule that is not identical, but has analogous functional or structural features. For example, a polypeptide analog retains the biological activity of a corresponding naturally-occurring polypeptide, while having certain biochemical modifications that enhance the analog's function relative to a naturally occurring polypeptide. Such biochemical modifications could increase the analog's protease resistance, membrane permeability, or half-life, without altering, for example, ligand binding. An analog may include an unnatural amino acid.

[0104] By “base editor (BE),” or “nucleobase editor (NBE)” is meant an agent that binds a polynucleotide and has nucleobase modifying activity. In various embodiments, the base editor comprises a nucleobase modifying polypeptide (e.g., a deaminase) and a polynucleotide programmable nucleotide binding domain in conjunction with a guide polynucleotide (e.g., guide RNA). In various embodiments, the agent is a biomolecular complex comprising a protein domain having base editing activity, i.e., a domain capable of modifying a base (e.g., A, T, C, G, or U) within a nucleic acid molecule (e.g., DNA). In some embodiments, the polynucleotide programmable DNA binding domain is fused or linked to a deaminase domain. In one embodiment, the agent is a fusion protein comprising one or more domains having base editing activity. In another embodiment, the protein domains having base editing activity are linked to the guide RNA (e.g., via an RNA binding motif on the guide RNA and an RNA binding domain fused to the deaminase). In some embodiments, the domains having base editing activity are capable of deaminating a base within a nucleic acid molecule. In some embodiments, the base editor is capable of deaminating one or more bases within a DNA molecule. In some embodiments, the base editor is capable of deaminating a cytosine (C) or an adenosine (A) within DNA. In some embodiments, the base editor is capable of deaminating a cytosine (C) and an adenosine (A) within DNA. In some embodiments, the base editor is a cytidine base editor (CBE). In some embodiments, the base editor is an adenosine base editor (ABE). In some embodiments, the base editor is an adenosine base editor (ABE) and a cytidine base editor (CBE). In some embodiments, the base editor is a nuclease-inactive Cas9 (dCas9) fused to an adenosine deaminase. In some embodiments, the Cas9 is a circular permutant Cas9 (e.g., spCas9 or saCas9). Circular permutant Cas9s are known in the art and described, for example, in Oakes et al., Cell 176, 254-267, 2019. In some embodiments, the base editor is fused to an inhibitor of base excision repair, for example, a UGI domain, or a dISN domain. In some embodiments, the fusion protein comprises a Cas9 nickase fused to a deaminase and an inhibitor of base excision repair, such as a UGI or dISN domain. In other embodiments the base editor is an abasic base editor.

[0105] In some embodiments, an adenosine deaminase is evolved from TadA. In some embodiments, the polynucleotide programmable DNA binding domain is a CRISPR associated (e.g., Cas or Cpf1) enzyme. In some embodiments, the base editor is a catalytically dead Cas9 (dCas9) fused to a deaminase domain. In some embodiments, the base editor is a Cas9 nickase (nCas9) fused to a deaminase domain. In some embodiments, the base editor is fused to an inhibitor of base excision repair (BER). In some embodiments, the inhibitor of base excision repair is a uracil DNA glycosylase inhibitor (UGI). In some embodiments, the inhibitor of base excision repair is an inosine base excision repair inhibitor. Details of base editors are described in International PCT Application Nos. PCT/2017/045381 (WO2018/027078) and PCT/US2016/058344 (WO2017/070632), each of which is incorporated herein by reference for its entirety. Also see Komor, A. C., et al., “Programmable editing of a target base in genomic DNA without double-stranded DNA cleavage” Nature 533, 420-424 (2016); Gaudelli, N. M., et al., “Programmable base editing of A⋅T to G⋅C in genomic DNA without DNA cleavage” Nature 551, 464-471 (2017); Komor, A. C., et al., “Improved base excision repair inhibition and bacteriophage Mu Gam protein yields C:G-to-T:A base editors with higher efficiency and product purity” Science Advances 3:eaao4774 (2017), and Rees, H. A., et al., “Base editing: precision chemistry on the genome and transcriptome of living cells.” Nat Rev Genet. 2018 December; 19(12):770-788. doi: 10.1038/s41576-018-0059-1, the entire contents of which are hereby incorporated by reference.

[0106] In some embodiments, base editors are generated (e.g., ABE8) by cloning an adenosine deaminase variant (e.g., TadA*8) into a scaffold that includes a circular permutant Cas9 (e.g., spCAS9) and a bipartite nuclear localization sequence. Circular permutant Cas9s are known in the art and described, for example, in Oakes et al., Cell 176, 254-267, 2019. Exemplary circular permutant sequences are set forth below, in which the bold sequence indicates sequence derived from Cas9, the italics sequence denotes a linker sequence, and the underlined sequence denotes a bipartite nuclear localization sequence.

CP5 (with MSP “NGC=Pam Variant with mutations Regular Cas9 likes NGG” PID=Protein Interacting Domain and “D10A” nickase):

EIGKATAKYFFYSNIMNFFKTEITLANGEIRKRPL
IETNGETGEIVWDKGRDFATVRKVLSMPQVNIVKK
TEVQTGGFSKESILPKRNSDKLIARKKDWDPKKYG
GFMQPTVAYSVLVVAKVEKGKSKKLKSVKELLGIT
IMERSSFEKNPIDFLEAKGYKEVKKDLIIKLPKYS
LFELENGRKRMLASAKFLQKGNELALPSKYVNFLY
LASHYEKLKGSPEDNEQKQLFVEQHKHYLDEIIEQ
ISEFSKRVILADANLDKVLSAYNKHRDKPIREQAE
NIIHLFTLTNLGAPRAFKYFDTTIARKEYRSTKEV
LDATLIHQSITGLYETRIDLSQLGGDGGSGGSGGS
GGSGGSGGSGGMDKKYSIGLAIGTNSVGWAVITDE
YKVPSKKFKVLGNTDRHSIKKNLIGALLFDSGETA
EATRLKRTARRRYTRRKNRICYLQEIFSNEMAKVD
DSFFHRLEESFLVEEDKKHERHPIFGNIVDEVAYH
EKYPTIYHLRKKLVDSTDKADLRLIYLALAHMIKF
RGHFLIEGDLNPDNSDVDKLFIQLVQTYNQLFEEN
PINASGVDAKAILSARLSKSRRLENLIAQLPGEKK
NGLFGNLIALSLGLTPNFKSNFDLAEDAKLQLSKD
TYDDDLDNLLAQIGDQYADLFLAAKNLSDAILLSD
ILRVNTEITKAPLSASMIKRYDEHHQDLTLLKALV
RQQLPEKYKEIFFDQSKNGYAGYIDGGASQEEFYK
FIKPILEKMDGTEELLVKLNREDLLRKQRTFDNGS
IPHQIHLGELHAILRRQEDFYPFLKDNREKIEKIL
TFRIPYYVGPLARGNSRFAWMTRKSEETITPWNFE
EVVDKGASAQSFIERMTNFDKNLPNEKVLPKHSLL
YEYFTVYNELTKVKYVTEGMRKPAFLSGEQKKAIV
DLLFKTNRKVTVKQLKEDYFKKIECFDSVEISGVE
DRFNASLGTYHDLLKIIKDKDFLDNEENEDILEDI
VLTLTLFEDREMIEERLKTYAHLFDDKVMKQLKRR
RYTGWGRLSRKLINGIRDKQSGKTILDFLKSDGFA
NRNFMQLIHDDSLTFKEDIQKAQVSGQGDSLHEHI
ANLAGSPAIKKGILQTVKVVDELVKVMGRHKPENI
VIEMARENQTTQKGQKNSRERMKRIEEGIKELGSQ
ILKEHPVENTQLQNEKLYLYYLQNGRDMYVDQELD
INRLSDYDVDHIVPQSFLKDDSIDNKVLTRSDKNR
GKSDNVPSEEVVKKMKNYWRQLLNAKLITQRKFDN
LTKAERGGLSELDKAGFIKRQLVETRQITKHVAQI
LDSRMNTKYDENDKLIREVKVITLKSKLVSDFRKD
FQFYKVREINNYHHAHDAYLNAVVGTALIKKYPKL
ESEFVYGDYKVYDVRKMIAKSEQEGADKRTADGSE
FESPKKKRKV*

[0107] In some embodiments, the ABE8 is selected from a base editor from Table 7 infra. In some embodiments, ABE8 contains an adenosine deaminase variant evolved from TadA. In some embodiments, the adenosine deaminase variant of ABE8 is a TadA*8 variant as described in Table 7 infra. In some embodiments, the adenosine deaminase variant is TadA*7.10 comprising one or more of an alteration selected from the group consisting of Y147T, Y147R, Q154S, Y123H, V82S, T166R, Q154R. In various embodiments, ABE8 comprises TadA*7.10 with alterations selected from the group consisting of Y147R+Q154R+Y123H; Y147R+Q154R+I76Y; Y147R+Q154R+T166R; Y147T+Q154R; Y147T+Q154S; V82S+Q154S; and Y123H+Y147R+Q154R+I76Y. In some embodiments ABE8 is a monomeric construct.

[0108] In some embodiments, ABE8 is a heterodimeric construct. In some embodiments the ABE8 base editor comprises the sequence:

MSEVEFSHEYTNMRHALTLAKRARDEREVPVGAVL
VLNNRVIGEGTNNRAIGLHDPTAHAEIMALRQGGL
VMQNYRLIDATLYVTFEPCVMCAGAMIHSRIGRVV
FGVRNAKTGAAGSLMDVLHYPGMNHRVEITEGILA
DECAALLCTFFRMPRQVFNAQKKAQSSTD

[0109] By way of example, the adenine base editor ABE to be used in the base editing compositions, systems and methods described herein has the nucleic acid sequence (8877 base pairs), (Addgene, Watertown, Mass.; Gaudelli N M, et al., Nature. 2017 Nov. 23; 551(7681):464-471. doi: 10.1038/nature24644; Koblan L W, et al., Nat Biotechnol. 2018 October; 36(9):843-846. doi: 10.1038/nbt.4172) as provided below. Polynucleotide sequences having at least 95% or greater identity to the ABE nucleic acid sequence are also encompassed.

ATATGCCAAGTACGCCCCCTATTGACGTCAATGAC
GGTAAATGGCCCGCCTGGCATTATGCCCAGTACAT
GACCTTATGGGACTTTCCTACTTGGCAGTACATCT
ACGTATTAGTCATCGCTATTACCATGGTGATGCGG
TTTTGGCAGTACATCAATGGGCGTGGATAGCGGTT
TGACTCACGGGGATTTCCAAGTCTCCACCCCATTG
ACGTCAATGGGAGTTTGTTTTGGCACCAAAATCAA
CGGGACTTTCCAAAATGTCGTAACAACTCCGCCCC
ATTGACGCAAATGGGCGGTAGGCGTGTACGGTGGG
AGGTCTATATAAGCAGAGCTGGTTTAGTGAACCGT
CAGATCCGCTAGAGATCCGCGGCCGCTAATACGAC
TCACTATAGGGAGAGCCGCCACCATGAAACGGACA
GCCGACGGAAGCGAGTTCGAGTCACCAAAGAAGAA
GCGGAAAGTCTCTGAAGTCGAGTTTAGCCACGAGT
ATTGGATGAGGCACGCACTGACCCTGGCAAAGCGA
GCATGGGATGAAAGAGAAGTCCCCGTGGGCGCCGT
GCTGGTGCACAACAATAGAGTGATCGGAGAGGGAT
GGAACAGGCCAATCGGCCGCCACGACCCTACCGCA
CACGCAGAGATCATGGCACTGAGGCAGGGAGGCCT
GGTCATGCAGAATTACCGCCTGATCGATGCCACCC
TGTATGTGACACTGGAGCCATGCGTGATGTGCGCA
GGAGCAATGATCCACAGCAGGATCGGAAGAGTGGT
GTTCGGAGCACGGGACGCCAAGACCGGCGCAGCAG
GCTCCCTGATGGATGTGCTGCACCACCCCGGCATG
AACCACCGGGTGGAGATCACAGAGGGAATCCTGGC
AGACGAGTGCGCCGCCCTGCTGAGCGATTTCTTTA
GAATGCGGAGACAGGAGATCAAGGCCCAGAAGAAG
GCACAGAGCTCCACCGACTCTGGAGGATCTAGCGG
AGGATCCTCTGGAAGCGAGACACCAGGCACAAGCG
AGTCCGCCACACCAGAGAGCTCCGGCGGCTCCTCC
GGAGGATCCTCTGAGGTGGAGTTTTCCCACGAGTA
CTGGATGAGACATGCCCTGACCCTGGCCAAGAGGG
CACGCGATGAGAGGGAGGTGCCTGTGGGAGCCGTG
CTGGTGCTGAACAATAGAGTGATCGGCGAGGGCTG
GAACAGAGCCATCGGCCTGCACGACCCAACAGCCC
ATGCCGAAATTATGGCCCTGAGACAGGGCGGCCTG
GTCATGCAGAACTACAGACTGATTGACGCCACCCT
GTACGTGACATTCGAGCCTTGCGTGATGTGCGCCG
GCGCCATGATCCACTCTAGGATCGGCCGCGTGGTG
TTTGGCGTGAGGAACGCAAAAACCGGCGCCGCAGG
CTCCCTGATGGACGTGCTGCACTACCCCGGCATGA
ATCACCGCGTCGAAATTACCGAGGGAATCCTGGCA
GATGAATGTGCCGCCCTGCTGTGCTATTTCTTTCG
GATGCCTAGACAGGTGTTCAATGCTCAGAAGAAGG
CCCAGAGCTCCACCGACTCCGGAGGATCTAGCGGA
GGCTCCTCTGGCTCTGAGACACCTGGCACAAGCGA
GAGCGCAACACCTGAAAGCAGCGGGGGCAGCAGCG
GGGGGTCAGACAAGAAGTACAGCATCGGCCTGGCC
ATCGGCACCAACTCTGTGGGCTGGGCCGTGATCAC
CGACGAGTACAAGGTGCCCAGCAAGAAATTCAAGG
TGCTGGGCAACACCGACCGGCACAGCATCAAGAAG
AACCTGATCGGAGCCCTGCTGTTCGACAGCGGCGA
AACAGCCGAGGCCACCCGGCTGAAGAGAACCGCCA
GAAGAAGATACACCAGACGGAAGAACCGGATCTGC
TATCTGCAAGAGATCTTCAGCAACGAGATGGCCAA
GGTGGACGACAGCTTCTTCCACAGACTGGAAGAGT
CCTTCCTGGTGGAAGAGGATAAGAAGCACGAGCGG
CACCCCATCTTCGGCAACATCGTGGACGAGGTGGC
CTACCACGAGAAGTACCCCACCATCTACCACCTGA
GAAAGAAACTGGTGGACAGCACCGACAAGGCCGAC
CTGCGGCTGATCTATCTGGCCCTGGCCCACATGAT
CAAGTTCCGGGGCCACTTCCTGATCGAGGGCGACC
TGAACCCCGACAACAGCGACGTGGACAAGCTGTTC
ATCCAGCTGGTGCAGACCTACAACCAGCTGTTCGA
GGAAAACCCCATCAACGCCAGCGGCGTGGACGCCA
AGGCCATCCTGTCTGCCAGACTGAGCAAGAGCAGA
CGGCTGGAAAATCTGATCGCCCAGCTGCCCGGCGA
GAAGAAGAATGGCCTGTTCGGAAACCTGATTGCCC
TGAGCCTGGGCCTGACCCCCAACTTCAAGAGCAAC
TTCGACCTGGCCGAGGATGCCAAACTGCAGCTGAG
CAAGGACACCTACGACGACGACCTGGACAACCTGC
TGGCCCAGATCGGCGACCAGTACGCCGACCTGTTT
CTGGCCGCCAAGAACCTGTCCGACGCCATCCTGCT
GAGCGACATCCTGAGAGTGAACACCGAGATCACCA
AGGCCCCCCTGAGCGCCTCTATGATCAAGAGATAC
GACGAGCACCACCAGGACCTGACCCTGCTGAAAGC
TCTCGTGCGGCAGCAGCTGCCTGAGAAGTACAAAG
AGATTTTCTTCGACCAGAGCAAGAACGGCTACGCC
GGCTACATTGACGGCGGAGCCAGCCAGGAAGAGTT
CTACAAGTTCATCAAGCCCATCCTGGAAAAGATGG
ACGGCACCGAGGAACTGCTCGTGAAGCTGAACAGA
GAGGACCTGCTGCGGAAGCAGCGGACCTTCGACAA
CGGCAGCATCCCCCACCAGATCCACCTGGGAGAGC
TGCACGCCATTCTGCGGCGGCAGGAAGATTTTTAC
CCATTCCTGAAGGACAACCGGGAAAAGATCGAGAA
GATCCTGACCTTCCGCATCCCCTACTACGTGGGCC
CTCTGGCCAGGGGAAACAGCAGATTCGCCTGGATG
ACCAGAAAGAGCGAGGAAACCATCACCCCCTGGAA
CTTCGAGGAAGTGGTGGACAAGGGCGCTTCCGCCC
AGAGCTTCATCGAGCGGATGACCAACTTCGATAAG
AACCTGCCCAACGAGAAGGTGCTGCCCAAGCACAG
CCTGCTGTACGAGTACTTCACCGTGTATAACGAGC
TGACCAAAGTGAAATACGTGACCGAGGGAATGAGA
AAGCCCGCCTTCCTGAGCGGCGAGCAGAAAAAGGC
CATCGTGGACCTGCTGTTCAAGACCAACCGGAAAG
TGACCGTGAAGCAGCTGAAAGAGGACTACTTCAAG
AAAATCGAGTGCTTCGACTCCGTGGAAATCTCCGG
CGTGGAAGATCGGTTCAACGCCTCCCTGGGCACAT
ACCACGATCTGCTGAAAATTATCAAGGACAAGGAC
TTCCTGGACAATGAGGAAAACGAGGACATTCTGGA
AGATATCGTGCTGACCCTGACACTGTTTGAGGACA
GAGAGATGATCGAGGAACGGCTGAAAACCTATGCC
CACCTGTTCGACGACAAAGTGATGAAGCAGCTGAA
GCGGCGGAGATACACCGGCTGGGGCAGGCTGAGCC
GGAAGCTGATCAACGGCATCCGGGACAAGCAGTCC
GGCAAGACAATCCTGGATTTCCTGAAGTCCGACGG
CTTCGCCAACAGAAACTTCATGCAGCTGATCCACG
ACGACAGCCTGACCTTTAAAGAGGACATCCAGAAA
GCCCAGGTGTCCGGCCAGGGCGATAGCCTGCACGA
GCACATTGCCAATCTGGCCGGCAGCCCCGCCATTA
AGAAGGGCATCCTGCAGACAGTGAAGGTGGTGGAC
GAGCTCGTGAAAGTGATGGGCCGGCACAAGCCCGA
GAACATCGTGATCGAAATGGCCAGAGAGAACCAGA
CCACCCAGAAGGGACAGAAGAACAGCCGCGAGAGA
ATGAAGCGGATCGAAGAGGGCATCAAAGAGCTGGG
CAGCCAGATCCTGAAAGAACACCCCGTGGAAAACA
CCCAGCTGCAGAACGAGAAGCTGTACCTGTACTAC
CTGCAGAATGGGCGGGATATGTACGTGGACCAGGA
ACTGGACATCAACCGGCTGTCCGACTACGATGTGG
ACCATATCGTGCCTCAGAGCTTTCTGAAGGACGAC
TCCATCGACAACAAGGTGCTGACCAGAAGCGACAA
GAACCGGGGCAAGAGCGACAACGTGCCCTCCGAAG
AGGTCGTGAAGAAGATGAAGAACTACTGGCGGCAG
CTGCTGAACGCCAAGCTGATTACCCAGAGAAAGTT
CGACAATCTGACCAAGGCCGAGAGAGGCGGCCTGA
GCGAACTGGATAAGGCCGGCTTCATCAAGAGACAG
CTGGTGGAAACCCGGCAGATCACAAAGCACGTGGC
ACAGATCCTGGACTCCCGGATGAACACTAAGTACG
ACGAGAATGACAAGCTGATCCGGGAAGTGAAAGTG
ATCACCCTGAAGTCCAAGCTGGTGTCCGATTTCCG
GAAGGATTTCCAGTTTTACAAAGTGCGCGAGATCA
ACAACTACCACCACGCCCACGACGCCTACCTGAAC
GCCGTCGTGGGAACCGCCCTGATCAAAAAGTACCC
TAAGCTGGAAAGCGAGTTCGTGTACGGCGACTACA
AGGTGTACGACGTGCGGAAGATGATCGCCAAGAGC
GAGCAGGAAATCGGCAAGGCTACCGCCAAGTACTT
CTTCTACAGCAACATCATGAACTTTTTCAAGACCG
AGATTACCCTGGCCAACGGCGAGATCCGGAAGCGG
CCTCTGATCGAGACAAACGGCGAAACCGGGGAGAT
CGTGTGGGATAAGGGCCGGGATTTTGCCACCGTGC
GGAAAGTGCTGAGCATGCCCCAAGTGAATATCGTG
AAAAAGACCGAGGTGCAGACAGGCGGCTTCAGCAA
AGAGTCTATCCTGCCCAAGAGGAACAGCGATAAGC
TGATCGCCAGAAAGAAGGACTGGGACCCTAAGAAG
TACGGCGGCTTCGACAGCCCCACCGTGGCCTATTC
TGTGCTGGTGGTGGCCAAAGTGGAAAAGGGCAAGT
CCAAGAAACTGAAGAGTGTGAAAGAGCTGCTGGGG
ATCACCATCATGGAAAGAAGCAGCTTCGAGAAGAA
TCCCATCGACTTTCTGGAAGCCAAGGGCTACAAAG
AAGTGAAAAAGGACCTGATCATCAAGCTGCCTAAG
TACTCCCTGTTCGAGCTGGAAAACGGCCGGAAGAG
AATGCTGGCCTCTGCCGGCGAACTGCAGAAGGGAA
ACGAACTGGCCCTGCCCTCCAAATATGTGAACTTC
CTGTACCTGGCCAGCCACTATGAGAAGCTGAAGGG
CTCCCCCGAGGATAATGAGCAGAAACAGCTGTTTG
TGGAACAGCACAAGCACTACCTGGACGAGATCATC
GAGCAGATCAGCGAGTTCTCCAAGAGAGTGATCCT
GGCCGACGCTAATCTGGACAAAGTGCTGTCCGCCT
ACAACAAGCACCGGGATAAGCCCATCAGAGAGCAG
GCCGAGAATATCATCCACCTGTTTACCCTGACCAA
TCTGGGAGCCCCTGCCGCCTTCAAGTACTTTGACA
CCACCATCGACCGGAAGAGGTACACCAGCACCAAA
GAGGTGCTGGACGCCACCCTGATCCACCAGAGCAT
CACCGGCCTGTACGAGACACGGATCGACCTGTCTC
AGCTGGGAGGTGACTCTGGCGGCTCAAAAAGAACC
GCCGACGGCAGCGAATTCGAGCCCAAGAAGAAGAG
GAAAGTCTAACCGGTCATCATCACCATCACCATTG
AGTTTAAACCCGCTGATCAGCCTCGACTGTGCCTT
CTAGTTGCCAGCCATCTGTTGTTTGCCCCTCCCCC
GTGCCTTCCTTGACCCTGGAAGGTGCCACTCCCAC
TGTCCTTTCCTAATAAAATGAGGAAATTGCATCGC
ATTGTCTGAGTAGGTGTCATTCTATTCTGGGGGGT
GGGGTGGGGCAGGACAGCAAGGGGGAGGATTGGGA
AGACAATAGCAGGCATGCTGGGGATGCGGTGGGCT
CTATGGCTTCTGAGGCGGAAAGAACCAGCTGGGGC
TCGATACCGTCGACCTCTAGCTAGAGCTTGGCGTA
ATCATGGTCATAGCTGTTTCCTGTGTGAAATTGTT
ATCCGCTCACAATTCCACACAACATACGAGCCGGA
AGCATAAAGTGTAAAGCCTAGGGTGCCTAATGAGT
GAGCTAACTCACATTAATTGCGTTGCGCTCACTGC
CCGCTTTCCAGTCGGGAAACCTGTCGTGCCAGCTG
CATTAATGAATCGGCCAACGCGCGGGGAGAGGCGG
TTTGCGTATTGGGCGCTCTTCCGCTTCCTCGCTCA
CTGACTCGCTGCGCTCGGTCGTTCGGCTGCGGCGA
GCGGTATCAGCTCACTCAAAGGCGGTAATACGGTT
ATCCACAGAATCAGGGGATAACGCAGGAAAGAACA
TGTGAGCAAAAGGCCAGCAAAAGGCCAGGAACCGT
AAAAAGGCCGCGTTGCTGGCGTTTTTCCATAGGCT
CCGCCCCCCTGACGAGCATCACAAAAATCGACGCT
CAAGTCAGAGGTGGCGAAACCCGACAGGACTATAA
AGATACCAGGCGTTTCCCCCTGGAAGCTCCCTCGT
GCGCTCTCCTGTTCCGACCCTGCCGCTTACCGGAT
ACCTGTCCGCCTTTCTCCCTTCGGGAAGCGTGGCG
CTTTCTCATAGCTCACGCTGTAGGTATCTCAGTTC
GGTGTAGGTCGTTCGCTCCAAGCTGGGCTGTGTGC
ACGAACCCCCCGTTCAGCCCGACCGCTGCGCCTTA
TCCGGTAACTATCGTCTTGAGTCCAACCCGGTAAG
ACACGACTTATCGCCACTGGCAGCAGCCACTGGTA
ACAGGATTAGCAGAGCGAGGTATGTAGGCGGTGCT
ACAGAGTTCTTGAAGTGGTGGCCTAACTACGGCTA
CACTAGAAGAACAGTATTTGGTATCTGCGCTCTGC
TGAAGCCAGTTACCTTCGGAAAAAGAGTTGGTAGC
TCTTGATCCGGCAAACAAACCACCGCTGGTAGCGG
TGGTTTTTTTGTTTGCAAGCAGCAGATTACGCGCA
GAAAAAAAGGATCTCAAGAAGATCCTTTGATCTTT
TCTACGGGGTCTGACACTCAGTGGAACGAAAACTC
ACGTTAAGGGATTTTGGTCATGAGATTATCAAAAA
GGATCTTCACCTAGATCCTTTTAAATTAAAAATGA
AGTTTTAAATCAATCTAAAGTATATATGAGTAAAC
TTGGTCTGACAGTTACCAATGCTTAATCAGTGAGG
CACCTATCTCAGCGATCTGTCTATTTCGTTCATCC
ATAGTTGCCTGACTCCCCGTCGTGTAGATAACTAC
GATACGGGAGGGCTTACCATCTGGCCCCAGTGCTG
CAATGATACCGCGAGACCCACGCTCACCGGCTCCA
GATTTATCAGCAATAAACCAGCCAGCCGGAAGGGC
CGAGCGCAGAAGTGGTCCTGCAACTTTATCCGCCT
CCATCCAGTCTATTAATTGTTGCCGGGAAGCTAGA
GTAAGTAGTTCGCCAGTTAATAGTTTGCGCAACGT
TGTTGCCATTGCTACAGGCATCGTGGTGTCACGCT
CGTCGTTTGGTATGGCTTCATTCAGCTCCGGTTCC
CAACGATCAAGGCGAGTTACATGATCCCCCATGTT
GTGCAAAAAAGCGGTTAGCTCCTTCGGTCCTCCGA
TCGTTGTCAGAAGTAAGTTGGCCGCAGTGTTATCA
CTCATGGTTATGGCAGCACTGCATAATTCTCTTAC
TGTCATGCCATCCGTAAGATGCTTTTCTGTGACTG
GTGAGTACTCAACCAAGTCATTCTGAGAATAGTGT
ATGCGGCGACCGAGTTGCTCTTGCCCGGCGTCAAT
ACGGGATAATACCGCGCCACATAGCAGAACTTTAA
AAGTGCTCATCATTGGAAAACGTTCTTCGGGGCGA
AAACTCTCAAGGATCTTACCGCTGTTGAGATCCAG
TTCGATGTAACCCACTCGTGCACCCAACTGATCTT
CAGCATCTTTTACTTTCACCAGCGTTTCTGGGTGA
GCAAAAACAGGAAGGCAAAATGCCGCAAAAAAGGG
AATAAGGGCGACACGGAAATGTTGAATACTCATAC
TCTTCCTTTTTCAATATTATTGAAGCATTTATCAG
GGTTATTGTCTCATGAGCGGATACATATTTGAATG
TATTTAGAAAAATAAACAAATAGGGGTTCCGCGCA
CATTTCCCCGAAAAGTGCCACCTGACGTCGACGGA
TCGGGAGATCGATCTCCCGATCCCCTAGGGTCGAC
TCTCAGTACAATCTGCTCTGATGCCGCATAGTTAA
GCCAGTATCTGCTCCCTGCTTGTGTGTTGGAGGTC
GCTGAGTAGTGCGCGAGCAAAATTTAAGCTACAAC
AAGGCAAGGCTTGACCGACAATTGCATGAAGAATC
TGCTTAGGGTTAGGCGTTTTGCGCTGCTTCGCGAT
GTACGGGCCAGATATACGCGTTGACATTGATTATT
GACTAGTTATTAATAGTAATCAATTACGGGGTCAT
TAGTTCATAGCCCATATATGGAGTTCCGCGTTACA
TAACTTACGGTAAATGGCCCGCCTGGCTGACCGCC
CAACGACCCCCGCCCATTGACGTCAATAATGACGT
ATGTTCCCATAGTAACGCCAATAGGGACTTTCCAT
TGACGTCAATGGGTGGAGTATTTACGGTAAACTGC
CCACTTGGCAGTACATCAAGTGTATC

[0110] By way of example, a cytidine base editor (CBE) as used in the base editing compositions, systems and methods described herein has the following nucleic acid sequence (8877 base pairs), (Addgene, Watertown, Mass.; Komor A C, et al., 2017, Sci Adv., 30; 3 (8):eaao4774. doi: 10.1126/sciadv.aao4774) as provided below. Polynucleotide sequences having at least 95% or greater identity to the BE4 nucleic acid sequence are also encompassed.

| | |
|---|---|
| 1 | ATATGCCAAG TACGCCCCCT ATTGACGTCA ATGACGGTAA ATGGCCCGCC TGGCATTATG |
| 61 | CCCAGTACAT GACCTTATGG GACTTTCCTA CTTGGCAGTA CATCTACGTA TTAGTCATCG |
| 121 | CTATTACCAT GGTGATGCGG TTTTGGCAGT ACATCAATGG GCGTGGATAG CGGTTTGACT |
| 181 | CACGGGGATT TCCAAGTCTC CACCCCATTG ACGTCAATGG GAGTTTGTTT TGGCACCAAA |
| 241 | ATCAACGGGA CTTTCCAAAA TGTCGTAACA ACTCCGCCCC ATTGACGCAA ATGGGCGGTA |
| 301 | GGCGTGTACG GTGGGAGGTC TATATAAGCA GAGCTGGTTT AGTGAACCGT CAGATCCGCT |
| 361 | AGAGATCCGC GGCCGCTAAT ACGACTCACT ATAGGGAGAG CCGCCACCAT GAGCTCAGAG |
| 421 | ACTGGCCCAG TGGCTGTGGA CCCCACATTG AGACGGCGGA TCGAGCCCCA TGAGTTTGAG |
| 481 | GTATTCTTCG ATCCGAGAGA GCTCCGCAAG GAGACCTGCC TGCTTTACGA AATTAATTGG |
| 541 | GGGGGCCGGC ACTCCATTTG GCGACATACA TCACAGAACA CTAACAAGCA CGTCGAAGTC |
| 601 | AACTTCATCG AGAAGTTCAC GACAGAAAGA TATTTCTGTC CGAACACAAG GTGCAGCATT |
| 661 | ACCTGGTTTC TCAGCTGGAG CCCATGCGGC GAATGTAGTA GGGCCATCAC TGAATTCCTG |
| 721 | TCAAGGTATC CCCACGTCAC TCTGTTTATT TACATCGCAA GGCTGTACCA CCACGCTGAC |
| 781 | CCCCGCAATC GACAAGGCCT GCGGGATTTG ATCTCTTCAG GTGTGACTAT CCAAATTATG |
| 841 | ACTGAGCAGG AGTCAGGATA CTGCTGGAGA AACTTTGTGA ATTATAGCCC GAGTAATGAA |
| 901 | GCCCACTGGC CTAGGTATCC CCATCTGTGG GTACGACTGT ACGTTCTTGA ACTGTACTGC |
| 961 | ATCATACTGG GCCTGCCTCC TTGTCTCAAC ATTCTGAGAA GGAAGCAGCC ACAGCTGACA |
| 1021 | TTCTTTACCA TCGCTCTTCA GTCTTGTCAT TACCAGCGAC TGCCCCCACA CATTCTCTGG |
| 1081 | GCCACCGGGT TGAAATCTGG TGGTTCTTCT GGTGGTTCTA GCGGCAGCGA GACTCCCGGG |
| 1141 | ACCTCAGAGT CCGCCACACC CGAAAGTTCT GGTGGTTCTT CTGGTGGTTC TGATAAAAAG |
| 1201 | TATTCTATTG GTTTAGCCAT CGGCACTAAT TCCGTTGGAT GGGCTGTCAT AACCGATGAA |
| 1261 | TACAAAGTAC CTTCAAAGAA ATTTAAGGTG TTGGGGAACA CAGACCGTCA TTCGATTAAA |
| 1321 | AAGAATCTTA TCGGTGCCCT CCTATTCGAT AGTGGCGAAA CGGCAGAGGC GACTCGCCTG |
| 1381 | AAACGAACCG CTCGGAGAAG GTATACACGT CGCAAGAACC GAATATGTTA CTTACAAGAA |
| 1441 | ATTTTTAGCA ATGAGATGGC CAAAGTTGAC GATTCTTTCT TTCACCGTTT GGAAGAGTCC |
| 1501 | TTCCTTGTCG AAGAGGACAA GAAACATGAA CGGCACCCCA TCTTTGGAAA CATAGTAGAT |
| 1561 | GAGGTGGCAT ATCATGAAAA GTACCCAACG ATTTATCACC TCAGAAAAAA GCTAGTTGAC |
| 1621 | TCAACTGATA AAGCGGACCT GAGGTTAATC TACTTGGCTC TTGCCCATAT GATAAAGTTC |
| 1681 | CGTGGGCACT TTCTCATTGA GGGTGATCTA AATCCGGACA ACTCGGATGT CGACAAACTG |
| 1741 | TTCATCCAGT TAGTACAAAC CTATAATCAG TTGTTTGAAG AGAACCCTAT AAATGCAAGT |
| 1801 | GGCGTGGATG CGAAGGCTAT TCTTAGCGCC CGCCTCTCTA AATCCCGACG GCTAGAAAAC |
| 1861 | CTGATCGCAC AATTACCCGG AGAGAAGAAA AATGGGTTGT TCGGTAACCT TATAGCGCTC |
| 1921 | TCACTAGGCC TGACACCAAA TTTTAAGTCG AACTTCGACT TAGCTGAAGA TGCCAAATTG |
| 1981 | CAGCTTAGTA AGGACACGTA CGATGACGAT CTCGACAATC TACTGGCACA AATTGGAGAT |
| 2041 | CAGTATGCGG ACTTATTTTT GGCTGCCAAA AACCTTAGCG ATGCAATCCT CCTATCTGAC |
| 2101 | ATACTGAGAG TTAATACTGA GATTACCAAG GCGCCGTTAT CCGCTTCAAT GATCAAAAGG |
| 2161 | TACGATGAAC ATCACCAAGA CTTGACACTT CTCAAGGCCC TAGTCCGTCA GCAACTGCCT |
| 2221 | GAGAAATATA AGGAAATATT CTTTGATCAG TCGAAAAACG GGTACGCAGG TTATATTGAC |
| 2281 | GGCGGAGCGA GTCAAGAGGA ATTCTACAAG TTTATCAAAC CCATATTAGA GAAGATGGAT |
| 2341 | GGGACGGAAG AGTTGCTTGT AAAACTCAAT CGCGAAGATC TACTGCGAAA GCAGCGGACT |
| 2401 | TTCGACAACG GTAGCATTCC ACATCAAATC CACTTAGGCG AATTGCATGC TATACTTAGA |
| 2461 | AGGCAGGAGG ATTTTTATCC GTTCCTCAAA GACAATCGTG AAAAGATTGA GAAAATCCTA |
| 2521 | ACCTTTCGCA TACCTTACTA TGTGGGACCC CTGGCCCGAG GGAACTCTCG GTTCGCATGG |
| 2581 | ATGACAAGAA AGTCCGAAGA AACGATTACT CCATGGAATT TTGAGGAAGT TGTCGATAAA |
| 2641 | GGTGCGTCAG CTCAATCGTT CATCGAGAGG ATGACCAACT TTGACAAGAA TTTACCGAAC |
| 2701 | GAAAAAGTAT TGCCTAAGCA CAGTTTACTT TACGAGTATT TCACAGTGTA CAATGAACTC |
| 2761 | ACGAAAGTTA AGTATGTCAC TGAGGGCATG CGTAAACCCG CCTTTCTAAG CGGAGAACAG |
| 2821 | AAGAAAGCAA TAGTAGATCT GTTATTCAAG ACCAACCGCA AAGTGACAGT TAAGCAATTG |
| 2881 | AAAGAGGACT ACTTTAAGAA AATTGAATGC TTCGATTCTG TCGAGATCTC CGGGGTAGAA |
| 2941 | GATCGATTTA ATGCGTCACT TGGTACGTAT CATGACCTCC TAAAGATAAT TAAAGATAAG |
| 3001 | GACTTCCTGG ATAACGAAGA GAATGAAGAT ATCTTAGAAG ATATAGTGTT GACTCTTACC |
| 3061 | CTCTTTGAAG ATCGGGAAAT GATTGAGGAA AGACTAAAAA CATACGCTCA CCTGTTCGAC |
| 3121 | GATAAGGTTA TGAAACAGTT AAAGAGGCGT CGCTATACGG GCTGGGGACG ATTGTCGCGG |
| 3181 | AAACTTATCA ACGGGATAAG AGACAAGCAA AGTGGTAAAA CTATTCTCGA TTTTCTAAAG |
| 3241 | AGCGACGGCT TCGCCAATAG GAACTTTATG CAGCTGATCC ATGATGACTC TTTAACCTTC |
| 3301 | AAAGAGGATA TACAAAAGGC ACAGGTTTCC GGACAAGGGG ACTCATTGCA CGAACATATT |
| 3361 | GCGAATCTTG CTGGTTCGCC AGCCATCAAA AAGGGCATAC TCCAGACAGT CAAAGTAGTG |
| 3421 | GATGAGCTAG TTAAGGTCAT GGGACGTCAC AAACCGGAAA ACATTGTAAT CGAGATGGCA |
| 3481 | CGCGAAAATC AAACGACTCA GAAGGGGCAA AAAAACAGTC GAGAGCGGAT GAAGAGAATA |
| 3541 | GAAGAGGGTA TTAAAGAACT GGGCAGCCAG ATCTTAAAGG AGCATCCTGT GGAAAATACC |
| 3601 | CAATTGCAGA ACGAGAAACT TTACCTCTAT TACCTACAAA ATGGAAGGGA CATGTATGTT |
| 3661 | GATCAGGAAC TGGACATAAA CCGTTTATCT GATTACGACG TCGATCACAT TGTACCCCAA |
| 3721 | TCCTTTTTGA AGGACGATTC AATCGACAAT AAAGTGCTTA CACGCTCGGA TAAGAACCGA |
| 3781 | GGGAAAAGTG ACAATGTTCC AAGCGAGGAA GTCGTAAAGA AAATGAAGAA CTATTGGCGG |
| 3841 | CAGCTCCTAA ATGCGAAACT GATAACGCAA AGAAAGTTCG ATAACTTAAC TAAAGCTGAG |
| 3901 | AGGGGTGGCT TGTCTGAACT TGACAAGGCC GGATTTATTA AACGTCAGCT CGTGGAAACC |
| 3961 | CGCCAAATCA CAAAGCATGT TGCACAGATA CTAGATTCCC GAATGAATAC GAAATACGAC |
| 4021 | GAGAACGATA AGCTGATTCG GGAAGTCAAA GTAATCACTT TAAAGTCAAA ATTGGTGTCG |
| 4081 | GACTTCAGAA AGGATTTTCA ATTCTATAAA GTTAGGGAGA TAAATAACTA CCACCATGCG |
| 4141 | CACGACGCTT ATCTTAATGC CGTCGTAGGG ACCGCACTCA TTAAGAAATA CCCGAAGCTA |
| 4201 | GAAAGTGAGT TTGTGTATGG TGATTACAAA GTTTATGACG TCCGTAAGAT GATCGCGAAA |
| 4261 | AGCGAACAGG AGATAGGCAA GGCTACAGCC AAATACTTCT TTTATTCTAA CATTATGAAT |
| 4321 | TTCTTTAAGA CGGAAATCAC TCTGGCAAAC GGAGAGATAC GCAAACGACC TTTAATTGAA |
| 4381 | ACCAATGGGG AGACAGGTGA AATCGTATGG GATAAGGGCC GGGACTTCGC GACGGTGAGA |
| 4441 | AAAGTTTTGT CCATGCCCCA AGTCAACATA GTAAAGAAAA CTGAGGTGCA GACCGGAGGG |
| 4501 | TTTTCAAAGG AATCGATTCT TCCAAAAAGG AATAGTGATA AGCTCATCGC TCGTAAAAAG |
| 4561 | GACTGGGACC CGAAAAAGTA CGGTGGCTTC GATAGCCCTA CAGTTGCCTA TTCTGTCCTA |
| 4621 | GTAGTGGCAA AAGTTGAGAA GGGAAAATCC AAGAAACTGA AGTCAGTCAA AGAATTATTG |
| 4681 | GGGATAACGA TTATGGAGCG CTCGTCTTTT GAAAAGAACC CCATCGACTT CCTTGAGGCG |
| 4741 | AAAGGTTACA AGGAAGTAAA AAAGGATCTC ATAATTAAAC TACCAAAGTA TAGTCTGTTT |
| 4801 | GAGTTAGAAA ATGGCCGAAA ACGGATGTTG GCTAGCGCCG GAGAGCTTCA AAAGGGGAAC |
| 4861 | GAACTCGCAC TACCGTCTAA ATACGTGAAT TTCCTGTATT TAGCGTCCCA TTACGAGAAG |
| 4921 | TTGAAAGGTT CACCTGAAGA TAACGAACAG AAGCAACTTT TTGTTGAGCA GCACAAACAT |
| 4981 | TATCTCGACG AAATCATAGA GCAAATTTCG GAATTCAGTA AGAGAGTCAT CCTAGCTGAT |
| 5041 | GCCAATCTGG ACAAAGTATT AAGCGCATAC AACAAGCACA GGGATAAACC CATACGTGAG |
| 5101 | CAGGCGGAAA ATATTATCCA TTTGTTTACT CTTACCAACC TCGGCGCTCC AGCCGCATTC |
| 5161 | AAGTATTTTG ACACAACGAT AGATCGCAAA CGATACACTT CTACCAAGGA GGTGCTAGAC |
| 5221 | GCGACACTGA TTCACCAATC CATCACGGGA TTATATGAAA CTCGGATAGA TTTGTCACAG |
| 5281 | CTTGGGGGTG ACTCTGGTGG TTCTGGAGGA TCTGGTGGTT CTACTAATCT GTCAGATATT |
| 5341 | ATTGAAAAGG AGACCGGTAA GCAACTGGTT ATCCAGGAAT CCATCCTCAT GCTCCCAGAG |
| 5401 | GAGGTGGAAG AAGTCATTGG GAACAAGCCG GAAAGCGATA TACTCGTGCA CACCGCCTAC |
| 5461 | GACGAGAGCA CCGACGAGAA TGTCATGCTT CTGACTAGCG ACGCCCCTGA ATACAAGCCT |
| 5521 | TGGGCTCTGG TCATACAGGA TAGCAACGGT GAGAACAAGA TTAAGATGCT CTCTGGTGGT |
| 5581 | TCTGGAGGAT CTGGTGGTTC TACTAATCTG TCAGATATTA TTGAAAAGGA GACCGGTAAG |
| 5641 | CAACTGGTTA TCCAGGAATC CATCCTCATG CTCCCAGAGG AGGTGGAAGA AGTCATTGGG |
| 5701 | AACAAGCCGG AAAGCGATAT ACTCGTGCAC ACCGCCTACG ACGAGAGCAC CGACGAGAAT |
| 5761 | GTCATGCTTC TGACTAGCGA CGCCCCTGAA TACAAGCCTT GGGCTCTGGT CATACAGGAT |
| 5821 | AGCAACGGTG AGAACAAGAT TAAGATGCTC TCTGGTGGTT CTCCCAAGAA GAAGAGGAAA |
| 5881 | GTCTAACCGG TCATCATCAC CATCACCATT GAGTTTAAAC CCGCTGATCA GCCTCGACTG |
| 5941 | TGCCTTCTAG TTGCCAGCCA TCTGTTGTTT GCCCCTCCCC CGTGCCTTCC TTGACCCTGG |
| 6001 | AAGGTGCCAC TCCCACTGTC CTTTCCTAAT AAAATGAGGA AATTGCATCG CATTGTCTGA |
| 6061 | GTAGGTGTCA TTCTATTCTG GGGGGTGGGG TGGGGCAGGA CAGCAAGGGG GAGGATTGGG |
| 6121 | AAGACAATAG CAGGCATGCT GGGGATGCGG TGGGCTCTAT GGCTTCTGAG GCGGAAAGAA |
| 6181 | CCAGCTGGGG CTCGATACCG TCGACCTCTA GCTAGAGCTT GGCGTAATCA TGGTCATAGC |
| 6241 | TGTTTCCTGT GTGAAATTGT TATCCGCTCA CAATTCCACA CAACATACGA GCCGGAAGCA |
| 6301 | TAAAGTGTAA AGCCTAGGGT GCCTAATGAG TGAGCTAACT CACATTAATT GCGTTGCGCT |
| 6361 | CACTGCCCGC TTTCCAGTCG GGAAACCTGT CGTGCCAGCT GCATTAATGA ATCGGCCAAC |
| 6421 | GCGCGGGGAG AGGCGGTTTG CGTATTGGGC GCTCTTCCGC TTCCTCGCTC ACTGACTCGC |
| 6481 | TGCGCTCGGT CGTTCGGCTG CGGCGAGCGG TATCAGCTCA CTCAAAGGCG GTAATACGGT |
| 6541 | TATCCACAGA ATCAGGGGAT AACGCAGGAA AGAACATGTG AGCAAAAGGC CAGCAAAAGG |
| 6601 | CCAGGAACCG TAAAAAGGCC GCGTTGCTGG CGTTTTTCCA TAGGCTCCGC CCCCCTGACG |
| 6661 | AGCATCACAA AAATCGACGC TCAAGTCAGA GGTGGCGAAA CCCGACAGGA CTATAAAGAT |
| 6721 | ACCAGGCGTT TCCCCCTGGA AGCTCCCTCG TGCGCTCTCC TGTTCCGACC CTGCCGCTTA |
| 6781 | CCGGATACCT GTCCGCCTTT CTCCCTTCGG GAAGCGTGGC GCTTTCTCAT AGCTCACGCT |
| 6841 | GTAGGTATCT CAGTTCGGTG TAGGTCGTTC GCTCCAAGCT GGGCTGTGTG CACGAACCCC |
| 6901 | CCGTTCAGCC CGACCGCTGC GCCTTATCCG GTAACTATCG TCTTGAGTCC AACCCGGTAA |
| 6961 | GACACGACTT ATCGCCACTG GCAGCAGCCA CTGGTAACAG GATTAGCAGA GCGAGGTATG |
| 7021 | TAGGCGGTGC TACAGAGTTC TTGAAGTGGT GGCCTAACTA CGGCTACACT AGAAGAACAG |
| 7081 | TATTTGGTAT CTGCGCTCTG CTGAAGCCAG TTACCTTCGG AAAAAGAGTT GGTAGCTCTT |
| 7141 | GATCCGGCAA ACAAACCACC GCTGGTAGCG GTGGTTTTTT TGTTTGCAAG CAGCAGATTA |
| 7201 | CGCGCAGAAA AAAAGGATCT CAAGAAGATC CTTTGATCTT TTCTACGGGG TCTGACGCTC |
| 7261 | AGTGGAACGA AAACTCACGT TAAGGGATTT TGGTCATGAG ATTATCAAAA AGGATCTTCA |
| 7321 | CCTAGATCCT TTTAAATTAA AAATGAAGTT TTAAATCAAT CTAAAGTATA TATGAGTAAA |
| 7381 | CTTGGTCTGA CAGTTACCAA TGCTTAATCA GTGAGGCACC TATCTCAGCG ATCTGTCTAT |
| 7441 | TTCGTTCATC CATAGTTGCC TGACTCCCCG TCGTGTAGAT AACTACGATA CGGGAGGGCT |
| 7501 | TACCATCTGG CCCCAGTGCT GCAATGATAC CGCGAGACCC ACGCTCACCG GCTCCAGATT |
| 7561 | TATCAGCAAT AAACCAGCCA GCCGGAAGGG CCGAGCGCAG AAGTGGTCCT GCAACTTTAT |
| 7621 | CCGCCTCCAT CCAGTCTATT AATTGTTGCC GGGAAGCTAG AGTAAGTAGT TCGCCAGTTA |
| 7681 | ATAGTTTGCG CAACGTTGTT GCCATTGCTA CAGGCATCGT GGTGTCACGC TCGTCGTTTG |
| 7741 | GTATGGCTTC ATTCAGCTCC GGTTCCCAAC GATCAAGGCG AGTTACATGA TCCCCCATGT |
| 7801 | TGTGCAAAAA AGCGGTTAGC TCCTTCGGTC CTCCGATCGT TGTCAGAAGT AAGTTGGCCG |
| 7861 | CAGTGTTATC ACTCATGGTT ATGGCAGCAC TGCATAATTC TCTTACTGTC ATGCCATCCG |
| 7921 | TAAGATGCTT TTCTGTGACT GGTGAGTACT CAACCAAGTC ATTCTGAGAA TAGTGTATGC |
| 7981 | GGCGACCGAG TTGCTCTTGC CCGGCGTCAA TACGGGATAA TACCGCGCCA CATAGCAGAA |
| 8041 | CTTTAAAAGT GCTCATCATT GGAAAACGTT CTTCGGGGCG AAAACTCTCA AGGATCTTAC |
| 8101 | CGCTGTTGAG ATCCAGTTCG ATGTAACCCA CTCGTGCACC CAACTGATCT TCAGCATCTT |
| 8161 | TTACTTTCAC CAGCGTTTCT GGGTGAGCAA AAACAGGAAG GCAAAATGCC GCAAAAAAGG |
| 8221 | GAATAAGGGC GACACGGAAA TGTTGAATAC TCATACTCTT CCTTTTTCAA TATTATTGAA |
| 8281 | GCATTTATCA GGGTTATTGT CTCATGAGCG GATACATATT TGAATGTATT TAGAAAAATA |
| 8341 | AACAAATAGG GGTTCCGCGC ACATTTCCCC GAAAAGTGCC ACCTGACGTC GACGGATCGG |
| 8401 | GAGATCGATC TCCCGATCCC CTAGGGTCGA CTCTCAGTAC AATCTGCTCT GATGCCGCAT |
| 8461 | AGTTAAGCCA GTATCTGCTC CCTGCTTGTG TGTTGGAGGT CGCTGAGTAG TGCGCGAGCA |
| 8521 | AAATTTAAGC TACAACAAGG CAAGGCTTGA CCGACAATTG CATGAAGAAT CTGCTTAGGG |
| 8581 | TTAGGCGTTT TGCGCTGCTT CGCGATGTAC GGGCCAGATA TACGCGTTGA CATTGATTAT |
| 8641 | TGACTAGTTA TTAATAGTAA TCAATTACGG GGTCATTAGT TCATAGCCCA TATATGGAGT |
| 8701 | TCCGCGTTAC ATAACTTACG GTAAATGGCC CGCCTGGCTG ACCGCCCAAC GACCCCCGCC |
| 8761 | CATTGACGTC AATAATGACG TATGTTCCCA TAGTAACGCC AATAGGGACT TTCCATTGAC |
| 8821 | GTCAATGGGT GGAGTATTTA CGGTAAACTG CCCACTTGGC AGTACATCAA GTGTATC |

[0111] In some embodiments, the cytidine base editor is BE4 having a nucleic acid sequence selected from one of the following:

Original BE4 nucleic acid sequence:
ATGagctcagagactggcccagtggctgtggaccccacattgagacggcggatcgagccccatgagtt
tgaggtattcttcgatccgagagagctccgcaaggagacctgcctgctttacgaaattaattgggggg
gccggcactccatttggcgacatacatcacagaacactaacaagcacgtcgaagtcaacttcatcgag
aagttcacgacagaaagatatttctgtccgaacacaaggtgcagcattacctggtttctcagctggag
ccgcgaatgtagtagggccatcactgaattcctgtcaaggtatccccacgtcactctgtttatttaca
tcgcaaggctgtaccaccacgctgacccccgcaatcgacaaggcctgcgggatttgatctcttcaggt
gtgactatccaaattatgactgagcaggagtcaggatactgctggagaaactttgtgaattatagccc
gagtaatgaagcccactggcctaggtatccccatctgtgggtacgactgtacgttcttgaactgtact
gcatcatactgggcctgcctccttgtctcaacattctgagaaggaagcagccacagctgacattcttt
accatcgctcttcagtcttgtcattaccagcgactgcccccacacattctctgggccaccgggttgaa
atctggtggttcttctggtggttctagcggcagcgagactcccgggacctcagagtccgccacacccg
aaagttctggtggttcttctggtggttctgataaaaagtattctattggtttagccatcggcactaat
tccgttggatgggctgtcataaccgatgaatacaaagtaccttcaaagaaatttaaggtgttggggaa
cacagaccgtcattcgattaaaaagaatcttatcggtgccctcctattcgatagtggcgaaacggcag
aggcgactcgcctgaaacgaaccgctcggagaaggtatacacgtcgcaagaaccgaatatgttactta
caagaaatttttagcaatgagatggccaaagttgacgattctttctttcaccgtttggaagagtcctt
ccttgtcgaagaggacaagaaacatgaacggcaccccatctttggaaacatagtagatgaggtggcat
atcatgaaaagtacccaacgatttatcacctcagaaaaaagctagttgactcaactgataaagcggac
ctgaggttaatctacttggctcttgcccatatgataaagttccgtgggcactttctcattgagggtga
tctaaatccggacaactcggatgtcgacaaactgttcatccagttagtacaaacctataatcagttgt
ttgaagagaaccctataaatgcaagtggcgtggatgcgaaggctattcttagcgcccgcctctctaaa
tcccgacggctagaaaacctgatcgcacaattacccggagagaagaaaaatgggttgttcggtaacct
tatagcgctctcactaggcctgacaccaaattttaagtcgaacttcgacttagctgaagatgccaaat
tgcagcttagtaaggacacgtacgatgacgatctcgacaatctactggcacaaattggagatcagtat
gcggacttatttttggctgccaaaaaccttagcgatgcaatcctcctatctgacatactgagagttaa
tactgagattaccaaggcgccgttatccgcttcaatgatcaaaaggtacgatgaacatcaccaagact
tgacacttctcaaggccctagtccgtcagcaactgcctgagaaatataaggaaatattctttgatcag
tcgaaaaacgggtacgcaggttatattgacggcggagcgagtcaagaggaattctacaagtttatcaa
acccatattagagaagatggatgggacggaagagttgcttgtaaaactcaatcgcgaagatctactgc
gaaagcagcggactttcgacaacggtagcattccacatcaaatccacttaggcgaattgcatgctata
cttagaaggcaggaggatttttatccgttcctcaaagacaatcgtgaaaagattgagaaaatcctaac
ctttcgcataccttactatgtgggacccctggcccgagggaactctcggttcgcatggatgacaagaa
agtccgaagaaacgattactccatggaattttgaggaagttgtcgataaaggtgcgtcagctcaatcg
ttcatcgagaggatgaccaactttgacaagaatttaccgaacgaaaaagtattgcctaagcacagttt
actttacgagtatttcacagtgtacaatgaactcacgaaagttaagtatgtcactgagggcatgcgta
aacccgcctttctaagcggagaacagaagaaagcaatagtagatctgttattcaagaccaaccgcaaa
gtgacagttaagcaattgaaagaggactactttaagaaaattgaatgcttcgattctgtcgagatctc
cggggtagaagatcgatttaatgcgtcacttggtacgtatcatgacctcctaaagataattaaagata
aggacttcctggataacgaagagaatgaagatatcttagaagatatagtgttgactcttaccctcttt
gaagatcgggaaatgattgaggaaagactaaaaacatacgctcacctgttcgacgataaggttatgaa
acagttaaagaggcgtcgctatacgggctggggacgattgtcgcggaaacttatcaacgggataagag
acaagcaaagtggtaaaactattctcgattttctaaagagcgacggcttcgccaataggaactttatg
cagctgatccatgatgactctttaaccttcaaagaggatatacaaaaggcacaggtttccggacaagg
ggactcattgcacgaacatattgcgaatcttgctggttcgccagccatcaaaaagggcatactccaga
cagtcaaagtagtggatgagctagttaaggtcatgggacgtcacaaaccggaaaacattgtaatcgag
atggcacgcgaaaatcaaacgactcagaaggggcaaaaaaacagtcgagagcggatgaagagaataga
agagggtattaaagaactgggcagccagatcttaaaggagcatcctgtggaaaatacccaattgcaga
acgagaaactttacctctattacctacaaaatggaagggacatgtatgttgatcaggaactggacata
aaccgtttatctgattacgacgtcgatcacattgtaccccaatcctttttgaaggacgattcaatcga
caataaagtgcttacacgctcggataagaaccgagggaaaagtgacaatgttccaagcgaggaagtcg
taaagaaaatgaagaactattggcggcagctcctaaatgcgaaactgataacgcaaagaaagttcgat
aacttaactaaagctgagaggggtggcttgtctgaacttgacaaggccggatttattaaacgtcagct
cgtggaaacccgccaaatcacaaagcatgttgcacagatactagattcccgaatgaatacgaaatacg
acgagaacgataagctgattcgggaagtcaaagtaatcactttaaagtcaaaattggtgtcggacttc
agaaaggattttcaattctataaagttagggagataaataactaccaccatgcgcacgacgcttatct
taatgccgtcgtagggaccgcactcattaagaaatacccgaagctagaaagtgagtttgtgtatggtg
attacaaagtttatgacgtccgtaagatgatcgcgaaaagcgaacaggagataggcaaggctacagcc
aaatacttcttttattctaacattatgaatttctttaagacggaaatcactctggcaaacggagagat
acgcaaacgacctttaattgaaaccaatggggagacaggtgaaatcgtatgggataagggccgggact
tcgcgacggtgagaaaagttttgtccatgccccaagtcaacatagtaaagaaaactgaggtgcagacc
ggagggttttcaaaggaatcgattcttccaaaaaggaatagtgataagctcatcgctcgtaaaaagga
ctgggacccgaaaaagtacggtggcttcgatagccctacagttgcctattctgtcctagtagtggcaa
aagttgagaagggaaaatccaagaaactgaagtcagtcaaagaattattggggataacgattatggag
cgctcgtcttttgaaaagaaccccatcgacttccttgaggcgaaaggttacaaggaagtaaaaaagga
tctcataattaaactaccaaagtatagtctgtttgagttagaaaatggccgaaaacggatgttggcta
gcgccggagagcttcaaaaggggaacgaactcgcactaccgtctaaatacgtgaatttcctgtattta
gcgtcccattacgagaagttgaaaggttcacctgaagataacgaacagaagcaactttttgttgagca
gcacaaacattatctcgacgaaatcatagagcaaatttcggaattcagtaagagagtcatcctagctg
atgccaatctggacaaagtattaagcgcatacaacaagcacagggataaacccatacgtgagcaggcg
gaaaatattatccatttgtttactcttaccaacctcggcgctccagccgcattcaagtattttgacac
aacgatagatcgcaaacgatacacttctaccaaggaggtgctagacgcgacactgattcaccaatcca
tcacgggattatatgaaactcggatagatttgtcacagcttgggggtgactctggtggttctggagga
tctggtggttctactaatctgtcagatattattgaaaaggagaccggtaagcaactggttatccagga
atccatcctcatgctcccagaggaggtggaagaagtcattgggaacaagccggaaagcgatatactcg
tgcacaccgcctacgacgagagcaccgacgagaatgtcatgcttctgactagcgacgcccctgaatac
aagccttgggctctggtcatacaggatagcaacggtgagaacaagattaagatgctctctggtggttc
tggaggatctggtggttctactaatctgtcagatattattgaaaaggagaccggtaagcaactggtta
tccaggaatccatcctcatgctcccagaggaggtggaagaagtcattgggaacaagccggaaagcgat
atactcgtgcacaccgcctacgacgagagcaccgacgagaatgtcatgcttctgactagcgacgcccc
tgaatacaagccttgggctctggtcatacaggatagcaacggtgagaacaagattaagatgctctctg
gtggttctAAAAGGACGGCGGACGGATCAGAGTTCGAGAGTCCGAAAAAAAAACGAAAGGTCGAAtaa
BE4 Codon Optimization 1 nucleic acid sequence:
ATGTCATCCGAAACCGGGCCAGTGGCCGTAGACCCAACACTCAGGAGGCGGATAGAACCCCATGAGTT
TGAAGTGTTCTTCGACCCCAGAGAGCTGCGCAAAGAGACTTGCCTCCTGTATGAAATAAATTGGGGGG
GTCGCCATTCAATTTGGAGGCACACTAGCCAGAATACTAACAAACACGTGGAGGTAAATTTTATCGAG
AAGTTTACCACCGAAAGATACTTTTGCCCCAATACACGGTGTTCAATTACCTGGTTTCTGTCATGGAG
TCCATGTGGAGAATGTAGTAGAGCGATAACTGAGTTCCTGTCTCGATATCCTCACGTCACGTTGTTTA
TATACATCGCTCGGCTTTATCACCATGCGGACCCGCGGAACAGGCAAGGTCTTCGGGACCTCATATCC
TCTGGGGTGACCATCCAGATAATGACGGAGCAAGAGAGCGGATACTGCTGGCGAAACTTTGTTAACTA
CAGCCCAAGCAATGAGGCACACTGGCCTAGATATCCGCATCTCTGGGTTCGACTGTATGTCCTTGAAC
TGTACTGCATAATTCTGGGACTTCCGCCATGCTTGAACATTCTGCGGCGGAAACAACCACAGCTGACC
TTTTTCACGATTGCTCTCCAAAGTTGTCACTACCAGCGATTGCCACCCCACATCTTGTGGGCTACTGG
ACTCAAGTCTGGAGGAAGTTCAGGCGGAAGCAGCGGGTCTGAAACGCCCGGAACCTCAGAGAGCGCAA
CGCCCGAAAGCTCTGGAGGGTCAAGTGGTGGTAGTGATAAGAAATACTCCATCGGCCTCGCCATCGGT
ACGAATTCTGTCGGTTGGGCCGTTATCACCGATGAGTACAAGGTCCCTTCTAAGAAATTCAAGGTTTT
GGGCAATACAGACCGCCATTCTATAAAAAAAAACCTGATCGGCGCCCTTTTGTTTGACAGTGGTGAGA
CTGCTGAAGCGACTCGCCTGAAGCGAACTGCCAGGAGGCGGTATACGAGGCGAAAAAACCGAATTTGT
TACCTCCAGGAGATTTTCTCAAATGAAATGGCCAAGGTAGATGATAGTTTTTTTCACCGCTTGGAAGA
AAGTTTTCTCGTTGAGGAGGACAAAAAGCACGAGAGGCACCCAATCTTTGGCAACATAGTCGATGAGG
TCGCATACCATGAGAAATATCCTACGATCTATCATCTCCGCAAGAAGCTGGTCGATAGCACGGATAAA
GCTGACCTCCGGCTGATCTACCTTGCTCTTGCTCACATGATTAAATTCAGGGGCCATTTCCTGATAGA
AGGAGACCTCAATCCCGACAATTCTGATGTCGACAAACTGTTTATTCAGCTCGTTCAGACCTATAATC
AACTCTTTGAGGAGAACCCCATCAATGCTTCAGGGGTGGACGCAAAGGCCATTTTGTCCGCGCGCTTG
AGTAAATCACGACGCCTCGAGAATTTGATAGCTCAACTGCCGGGTGAGAAGAAAAACGGGTTGTTTGG
GAATCTCATAGCGTTGAGTTTGGGACTTACGCCAAACTTTAAGTCTAACTTTGATTTGGCCGAAGATG
CCAAATTGCAGCTGTCCAAAGATACCTATGATGACGACTTGGATAACCTTCTTGCGCAGATTGGTGAC
CAATACGCGGATCTGTTTCTTGCCGCAAAAAATCTGTCCGACGCCATACTCTTGTCCGATATACTGCG
CGTCAATACTGAGATAACTAAGGCTCCCCTCAGCGCGTCCATGATTAAAAGATACGATGAGCACCACC
AAGATCTCACTCTGTTGAAAGCCCTGGTTCGCCAGCAGCTTCCAGAGAAGTATAAGGAGATATTTTTC
GACCAATCTAAAAACGGCTATGCGGGTTACATTGACGGTGGCGCCTCTCAAGAAGAATTCTACAAGTT
TATAAAGCCGATACTTGAGAAAATGGACGGTACAGAGGAATTGTTGGTTAAGCTCAATCGCGAGGACT
TGTTGAGAAAGCAGCGCACATTTGACAATGGTAGTATTCCACACCAGATTCATCTGGGCGAGTTGCAT
GCCATTCTTAGAAGACAAGAAGATTTTTATCCGTTTCTGAAAGATAACAGAGAAAAGATTGAAAAGAT
ACTTACCTTTCGCATACCGTATTATGTAGGTCCCCTGGCTAGAGGGAACAGTCGCTTCGCTTGGATGA
CTCGAAAATCAGAAGAAACAATAACCCCCTGGAATTTTGAAGAAGTGGTAGATAAAGGTGCGAGTGCC
CAATCTTTTATTGAGCGGATGACAAATTTTGACAAGAATCTGCCTAACGAAAAGGTGCTTCCCAAGCA
TTCCCTTTTGTATGAATACTTTACAGTATATAATGAACTGACTAAAGTGAAGTACGTTACCGAGGGGA
TGCGAAAGCCAGCTTTTCTCAGTGGCGAGCAGAAAAAAGCAATAGTTGACCTGCTGTTCAAGACGAAT
AGGAAGGTTACCGTCAAACAGCTCAAAGAAGATTACTTTAAAAAGATCGAATGTTTTGATTCAGTTGA
GATAAGCGGAGTAGAGGATAGATTTAACGCAAGTCTTGGAACTTATCATGACCTTTTGAAGATCATCA
AGGATAAAGATTTTTTGGACAACGAGGAGAATGAAGATATCCTGGAAGATATAGTACTTACCTTGACG
CTTTTTGAAGATCGAGAGATGATCGAGGAGCGACTTAAGACGTACGCACATCTCTTTGACGATAAGGT
TATGAAACAATTGAAACGCCGGCGGTATACTGGCTGGGGCAGGCTTTCTCGAAAGCTGATTAATGGTA
TCCGCGATAAGCAGTCTGGAAAGACAATCCTTGACTTTCTGAAAAGTGATGGATTTGCAAATAGAAAC
TTTATGCAGCTTATACATGATGACTCTTTGACGTTCAAGGAAGACATCCAGAAGGCACAGGTATCCGG
CCAAGGGGATAGCCTCCATGAACACATAGCCAACCTGGCCGGCTCACCAGCTATTAAAAAGGGAATAT
TGCAAACCGTTAAGGTTGTTGACGAACTCGTTAAGGTTATGGGCCGACACAAACCAGAGAATATCGTG
ATTGAGATGGCTAGGGAGAATCAGACCACTCAAAAAGGTCAGAAAAATTCTCGCGAAAGGATGAAGCG
AATTGAAGAGGGAATCAAAGAACTTGGCTCTCAAATTTTGAAAGAGCACCCGGTAGAAAACACTCAGC
TGCAGAATGAAAAGCTGTATCTGTATTATCTGCAGAATGGTCGAGATATGTACGTTGATCAGGAGCTG
GATATCAATAGGCTCAGTGACTACGATGTCGACCACATCGTTCCTCAATCTTTCCTGAAAGATGACTC
TATCGACAACAAAGTGTTGACGCGATCAGATAAGAACCGGGGAAAATCCGACAATGTACCCTCAGAAG
AAGTTGTCAAGAAGATGAAAAACTATTGGAGACAATTGCTGAACGCCAAGCTCATAACACAACGCAAG
TTCGATAACTTGACGAAAGCCGAAAGAGGTGGGTTGTCAGAATTGGACAAAGCTGGCTTTATTAAGCG
CCAATTGGTGGAGACCCGGCAGATTACGAAACACGTAGCACAAATTTTGGATTCACGAATGAATACCA
AATACGACGAAAACGACAAATTGATACGCGAGGTGAAAGTGATTACGCTTAAGAGTAAGTTGGTTTCC
GATTTCAGGAAGGATTTTCAGTTTTACAAAGTAAGAGAAATAAACAACTACCACCACGCCCATGATGC
TTACCTCAACGCGGTAGTTGGCACAGCTCTTATCAAAAAATATCCAAAGCTGGAAAGCGAGTTCGTTT
ACGGTGACTATAAAGTATACGACGTTCGGAAGATGATAGCCAAATCAGAGCAGGAAATTGGGAAGGCA
ACCGCAAAATACTTCTTCTATTCAAACATCATGAACTTCTTTAAGACGGAGATTACGCTCGCGAACGG
CGAAATACGCAAGAGGCCCCTCATAGAGACTAACGGCGAAACCGGGGAGATCGTATGGGACAAAGGAC
GGGACTTTGCGACCGTTAGAAAAGTACTTTCAATGCCACAAGTGAATATTGTTAAAAAGACAGAAGTA
CAAACAGGGGGGTTCAGTAAGGAATCCATTTTGCCCAAGCGGAACAGTGATAAATTGATAGCAAGGAA
AAAAGATTGGGACCCTAAGAAGTACGGTGGTTTCGACTCTCCTACCGTTGCATATTCAGTCCTTGTAG
TTGCGAAAGTGGAAAAGGGGAAAAGTAAGAAGCTTAAGAGTGTTAAAGAGCTTCTGGGCATAACCATA
ATGGAACGGTCTAGCTTCGAGAAAAATCCAATTGACTTTCTCGAGGCTAAAGGTTACAAGGAGGTAAA
AAAGGACCTGATAATTAAACTCCCAAAGTACAGTCTCTTCGAGTTGGAGAATGGGAGGAAGAGAATGT
TGGCATCTGCAGGGGAGCTCCAAAAGGGGAACGAGCTGGCTCTGCCTTCAAAATACGTGAACTTTCTG
TACCTGGCCAGCCACTACGAGAAACTCAAGGGTTCTCCTGAGGATAACGAGCAGAAACAGCTGTTTGT
AGAGCAGCACAAGCATTACCTGGACGAGATAATTGAGCAAATTAGTGAGTTCTCAAAAAGAGTAATCC
TTGCAGACGCGAATCTGGATAAAGTTCTTTCCGCCTATAATAAGCACCGGGACAAGCCTATACGAGAA
CAAGCCGAGAACATCATTCACCTCTTTACCCTTACTAATCTGGGCGCGCCGGCCGCCTTCAAATACTT
CGACACCACGATAGACAGGAAAAGGTATACGAGTACCAAAGAAGTACTTGACGCCACTCTCATCCACC
AGTCTATAACAGGGTTGTACGAAACGAGGATAGATTTGTCCCAGCTCGGCGGCGACTCAGGAGGGTCA
GGCGGCTCCGGTGGATCAACGAATCTTTCCGACATAATCGAGAAAGAAACCGGCAAACAGTTGGTGAT
CCAAGAATCAATCCTGATGCTGCCTGAAGAAGTAGAAGAGGTGATTGGCAACAAACCTGAGTCTGACA
TTCTTGTCCACACCGCGTATGACGAGAGCACGGACGAGAACGTTATGCTTCTCACTAGCGACGCCCCT
GAGTATAAACCATGGGCGCTGGTCATCCAAGATTCCAATGGGGAAAACAAGATTAAGATGCTTAGTGG
TGGGTCTGGAGGGAGCGGTGGGTCCACGAACCTCAGCGACATTATTGAAAAAGAGACTGGTAAACAAC
TTGTAATACAAGAGTCTATTCTGATGTTGCCTGAAGAGGTGGAGGAGGTGATTGGGAACAAACCGGAG
TCTGATATACTTGTTCATACCGCCTATGACGAATCTACTGATGAGAATGTGATGCTTTTaACGTCAGA
CGCTCCCGAGTACAAACCCTGGGCTCTGGTGATTCAGGACAGCAATGGTGAGAATAAGATTAAAATGT
TGAGTGGGGGCTCAAAGCGCACGGCTGACGGTAGCGAATTTGAGAGCCCCAAAAAAAAACGAAAGGTC
GAAtaa
BE4 Codon Optimization 2 nucleic acid sequence:
ATGAGCAGCGAGACAGGCCCTGTGGCTGTGGATCCTACACTGCGGAGAAGAATCGAGCCCCACGAGTT
CGAGGTGTTCTTCGACCCCAGAGAGCTGCGGAAAGAGACATGCCTGCTGTACGAGATCAACTGGGGCG
GCAGACACTCTATCTGGCGGCACACAAGCCAGAACACCAACAAGCACGTGGAAGTGAACTTTATCGAG
AAGTTTACGACCGAGCGGTACTTCTGCCCCAACACCAGATGCAGCATCACCTGGTTTCTGAGCTGGTC
CCCTTGCGGCGAGTGCAGCAGAGCCATCACCGAGTTTCTGTCCAGATATCCCCACGTGACCCTGTTCA
TCTATATCGCCCGGCTGTACCACCACGCCGATCCTAGAAATAGACAGGGACTGCGCGACCTGATCAGC
AGCGGAGTGACCATCCAGATCATGACCGAGCAAGAGAGCGGCTACTGCTGGCGGAACTTCGTGAACTA
CAGCCCCAGCAACGAAGCCCACTGGCCTAGATATCCTCACCTGTGGGTCCGACTGTACGTGCTGGAAC
TGTACTGCATCATCCTGGGCCTGCCTCCATGCCTGAACATCCTGAGAAGAAAGCAGCCTCAGCTGACC
TTCTTCACAATCGCCCTGCAGAGCTGCCACTACCAGAGACTGCCTCCACACATCCTGTGGGCCACCGG
ACTTAAGAGCGGAGGATCTAGCGGCGGCTCTAGCGGATCTGAGACACCTGGCACAAGCGAGTCTGCCA
CACCTGAGAGTAGCGGCGGATCTTCTGGCGGCTCCGACAAGAAGTACTCTATCGGACTGGCCATCGGC
ACCAACTCTGTTGGATGGGCCGTGATCACCGACGAGTACAAGGTGCCCAGCAAGAAATTCAAGGTGCT
GGGCAACACCGACCGGCACAGCATCAAGAAGAATCTGATCGGCGCCCTGCTGTTCGACTCTGGCGAAA
CAGCCGAAGCCACCAGACTGAAGAGAACCGCCAGGCGGAGATACACCCGGCGGAAGAACCGGATCTGC
TACCTGCAAGAGATCTTCAGCAACGAGATGGCCAAGGTGGACGACAGCTTCTTCCACAGACTGGAAGA
GTCCTTCCTGGTGGAAGAGGACAAGAAGCACGAGCGGCACCCCATCTTCGGCAACATCGTGGATGAGG
TGGCCTACCACGAGAAGTACCCCACCATCTACCACCTGAGAAAGAAACTGGTGGACAGCACCGACAAG
GCCGACCTGAGACTGATCTACCTGGCTCTGGCCCACATGATCAAGTTCCGGGGCCACTTTCTGATCGA
GGGCGATCTGAACCCCGACAACAGCGACGTGGACAAGCTGTTCATCCAGCTGGTGCAGACCTACAACC
AGCTGTTCGAGGAAAACCCCATCAACGCCTCTGGCGTGGACGCCAAGGCTATCCTGTCTGCCAGACTG
AGCAAGAGCAGAAGGCTGGAAAACCTGATCGCCCAGCTGCCTGGCGAGAAGAAGAATGGCCTGTTCGG
CAACCTGATTGCCCTGAGCCTGGGACTGACCCCTAACTTCAAGAGCAACTTCGACCTGGCCGAGGATG
CCAAACTGCAGCTGAGCAAGGACACCTACGACGACGACCTGGACAATCTGCTGGCCCAGATCGGCGAT
CAGTACGCCGACTTGTTTCTGGCCGCCAAGAACCTGTCCGACGCCATCCTGCTGAGCGATATCCTGAG
AGTGAACACCGAGATCACAAAGGCCCCTCTGAGCGCCTCTATGATCAAGAGATACGACGAGCACCACC
AGGATCTGACCCTGCTGAAGGCCCTCGTTAGACAGCAGCTGCCAGAGAAGTACAAAGAGATTTTCTTC
GATCAGTCCAAGAACGGCTACGCCGGCTACATTGATGGCGGAGCCAGCCAAGAGGAATTCTACAAGTT
CATCAAGCCCATCCTGGAAAAGATGGACGGCACCGAGGAACTGCTGGTCAAGCTGAACAGAGAGGACC
TGCTGCGGAAGCAGCGGACCTTCGACAATGGCTCTATCCCTCACCAGATCCACCTGGGAGAGCTGCAC
GCCATTCTGCGGAGACAAGAGGACTTTTACCCATTCCTGAAGGACAACCGGGAAAAGATCGAGAAGAT
CCTGACCTTCAGGATCCCCTACTACGTGGGACCACTGGCCAGAGGCAATAGCAGATTCGCCTGGATGA
CCAGAAAGAGCGAGGAAACCATCACACCCTGGAACTTCGAGGAAGTGGTGGACAAGGGCGCCAGCGCT
CAGTCCTTCATCGAGCGGATGACCAACTTCGATAAGAACCTGCCTAACGAGAAGGTGCTGCCCAAGCA
CTCCCTGCTGTATGAGTACTTCACCGTGTACAACGAGCTGACCAAAGTGAAATACGTGACCGAGGGAA
TGAGAAAGCCCGCCTTTCTGAGCGGCGAGCAGAAAAAGGCCATTGTGGATCTGCTGTTCAAGACCAAC
CGGAAAGTGACCGTGAAGCAGCTGAAAGAGGACTACTTCAAGAAAATCGAGTGCTTCGACAGCGTGGA
AATCAGCGGCGTGGAAGATCGGTTCAATGCCAGCCTGGGCACATACCACGACCTGCTGAAAATTATCA
AGGACAAGGACTTCCTGGACAACGAAGAGAACGAGGACATTCTCGAGGACATCGTGCTGACCCTGACA
CTGTTTGAGGACAGAGAGATGATCGAGGAACGGCTGAAAACATACGCCCACCTGTTCGACGACAAAGT
GATGAAGCAACTGAAGCGGAGGCGGTACACAGGCTGGGGCAGACTGTCTCGGAAGCTGATCAACGGCA
TCCGGGATAAGCAGTCCGGCAAGACAATCCTGGATTTCCTGAAGTCCGACGGCTTCGCCAACAGAAAC
TTCATGCAGCTGATCCACGACGACAGCCTGACCTTTAAAGAGGACATCCAGAAAGCCCAGGTGTCCGG
CCAAGGCGATTCTCTGCACGAGCACATTGCCAACCTGGCCGGATCTCCCGCCATTAAGAAGGGCATCC
TGCAGACAGTGAAGGTGGTGGACGAGCTTGTGAAAGTGATGGGCAGACACAAGCCCGAGAACATCGTG
ATCGAAATGGCCAGAGAGAACCAGACCACACAGAAGGGCCAGAAGAACAGCCGCGAGAGAATGAAGCG
GATCGAAGAGGGCATCAAAGAGCTGGGCAGCCAGATCCTGAAAGAACACCCCGTGGAAAACACCCAGC
TGCAGAACGAGAAGCTGTACCTGTACTACCTGCAGAATGGACGGGATATGTACGTGGACCAAGAGCTG
GACATCAACCGGCTGAGCGACTACGATGTGGACCATATCGTGCCCCAGAGCTTTCTGAAGGACGACTC
CATCGATAACAAGGTCCTGACCAGAAGCGACAAGAACCGGGGCAAGAGCGATAACGTGCCCTCCGAAG
AGGTGGTCAAGAAGATGAAGAACTACTGGCGACAGCTGCTGAACGCCAAGCTGATTACCCAGCGGAAG
TTCGATAACCTGACCAAGGCCGAGAGAGGCGGCCTGAGCGAACTTGATAAGGCCGGCTTCATTAAGCG
GCAGCTGGTGGAAACCCGGCAGATCACCAAACACGTGGCACAGATTCTGGACTCCCGGATGAACACTA
AGTACGACGAGAATGACAAGCTGATCCGGGAAGTGAAAGTCATCACCCTGAAGTCTAAGCTGGTGTCC
GATTTCCGGAAGGATTTCCAGTTCTACAAAGTGCGGGAAATCAACAACTACCATCACGCCCACGACGC
CTACCTGAATGCCGTTGTTGGAACAGCCCTGATCAAGAAGTATCCCAAGCTGGAAAGCGAGTTCGTGT
ACGGCGACTACAAGGTGTACGACGTGCGGAAGATGATCGCCAAGAGCGAACAAGAGATCGGCAAGGCT
ACCGCCAAGTACTTTTTCTACAGCAACATCATGAACTTTTTCAAGACAGAGATCACCCTGGCCAACGG
CGAGATCCGGAAAAGACCCCTGATCGAGACAAACGGCGAAACCGGGGAGATCGTGTGGGATAAGGGCA
GAGATTTTGCCACAGTGCGGAAAGTGCTGAGCATGCCCCAAGTGAATATCGTGAAGAAAACCGAGGTG
CAGACAGGCGGCTTCAGCAAAGAGTCTATCCTGCCTAAGCGGAACAGCGATAAGCTGATCGCCAGAAA
GAAGGACTGGGACCCTAAGAAGTACGGCGGCTTCGATAGCCCTACCGTGGCCTATTCTGTGCTGGTGG
TGGCCAAAGTGGAAAAGGGCAAGTCCAAAAAGCTCAAGAGCGTGAAAGAGCTGCTGGGGATCACCATC
ATGGAAAGAAGCAGCTTTGAGAAGAACCCGATCGACTTTCTGGAAGCCAAGGGCTACAAAGAAGTCAA
GAAGGACCTCATCATCAAGCTCCCCAAGTACAGCCTGTTCGAGCTGGAAAATGGCCGGAAGCGGATGC
TGGCCTCAGCAGGCGAACTGCAGAAAGGCAATGAACTGGCCCTGCCTAGCAAATACGTCAACTTCCTG
TACCTGGCCAGCCACTATGAGAAGCTGAAGGGCAGCCCCGAGGACAATGAGCAAAAGCAGCTGTTTGT
GGAACAGCACAAGCACTACCTGGACGAGATCATCGAGCAGATCAGCGAGTTCTCCAAGAGAGTGATCC
TGGCCGACGCTAACCTGGATAAGGTGCTGTCTGCCTATAACAAGCACCGGGACAAGCCTATCAGAGAG
CAGGCCGAGAATATCATCCACCTGTTTACCCTGACCAACCTGGGAGCCCCTGCCGCCTTCAAGTACTT
CGACACCACCATCGACCGGAAGAGGTACACCAGCACCAAAGAGGTGCTGGACGCCACACTGATCCACC
AGTCTATCACCGGCCTGTACGAAACCCGGATCGACCTGTCTCAGCTCGGCGGCGATTCTGGTGGTTCT
GGCGGAAGTGGCGGATCCACCAATCTGAGCGACATCATCGAAAAAGAGACAGGCAAGCAGCTCGTGAT
CCAAGAATCCATCCTGATGCTGCCTGAAGAGGTTGAGGAAGTGATCGGCAACAAGCCTGAGTCCGACA
TCCTGGTGCACACCGCCTACGATGAGAGCACCGATGAGAACGTCATGCTGCTGACAAGCGACGCCCCT
GAGTACAAGCCTTGGGCTCTCGTGATTCAGGACAGCAATGGGGAGAACAAGATCAAGATGCTGAGCGG
AGGTAGCGGAGGCAGTGGCGGAAGCACAAACCTGTCTGATATCATTGAAAAAGAAACCGGGAAGCAAC
TGGTCATTCAAGAGTCCATTCTCATGCTCCCGGAAGAAGTCGAGGAAGTCATTGGAAACAAACCCGAG
AGCGATATTCTGGTCCACACAGCCTATGACGAGTCTACAGACGAAAACGTGATGCTCCTGACCTCTGA
CGCTCCCGAGTATAAGCCCTGGGCACTTGTTATCCAGGACTCTAACGGGGAAAACAAAATCAAAATGT
TGTCCGGCGGCAGCAAGCGGACAGCCGATGGATCTGAGTTCGAGAGCCCCAAGAAGAAACGGAAGGTg
GAGtaa

[0112] By “base editing activity” is meant acting to chemically alter a base within a polynucleotide. In one embodiment, a first base is converted to a second base. In one embodiment, the base editing activity is cytidine deaminase activity, e.g., converting target C⋅G to T⋅A. In another embodiment, the base editing activity is adenosine or adenine deaminase activity, e.g., converting A⋅T to G⋅C. In another embodiment, the base editing activity is cytidine deaminase activity, e.g., converting target C⋅G to TA and adenosine or adenine deaminase activity, e.g., converting A⋅T to G⋅C.

[0113] The term “base editor system” refers to a system for editing a nucleobase of a target nucleotide sequence. In various embodiments, the base editor (BE) system comprises (1) a polynucleotide programmable nucleotide binding domain, a deaminase domain and a cytidine deaminase domain for deaminating nucleobases in the target nucleotide sequence; and (2) one or more guide polynucleotides (e.g., guide RNA) in conjunction with the polynucleotide programmable nucleotide binding domain. In various embodiments, the base editor (BE) system comprises a nucleobase editor domains selected from an adenosine deaminase or a cytidine deaminase, and a domain having nucleic acid sequence specific binding activity. In some embodiments, the base editor system comprises (1) a base editor (BE) comprising a polynucleotide programmable DNA binding domain and a deaminase domain for deaminating one or more nucleobases in a target nucleotide sequence; and (2) one or more guide RNAs in conjunction with the polynucleotide programmable DNA binding domain. In some embodiments, the polynucleotide programmable nucleotide binding domain is a polynucleotide programmable DNA binding domain. In some embodiments, the base editor is a cytidine base editor (CBE). In some embodiments, the base editor is an adenine or adenosine base editor (ABE). In some embodiments, the base editor is an adenine or adenosine base editor (ABE) or a cytidine base editor (CBE).

[0114] The term “Cas9” or “Cas9 domain” refers to an RNA guided nuclease comprising a Cas9 protein, or a fragment thereof (e.g., a protein comprising an active, inactive, or partially active DNA cleavage domain of Cas9, and/or the gRNA binding domain of Cas9). A Cas9 nuclease is also referred to sometimes as a casn1 nuclease or a CRISPR (clustered regularly interspaced short palindromic repeat) associated nuclease. An exemplary Cas9, is Streptococcus pyogenes Cas9 (spCas9), the amino acid sequence of which is provided below:

MDKKYSIGLDIGTNSVGWAVITDDYKVPSKKFKVLGNTDRHSIKKNLIGALLFGSGETAEAT
RLKRTARRRYTRRKNRICYLQEIFSNEMAKVDDSFFHRLEESFLVEEDKKHERHPIFGNIVD
EVAYHEKYPTIYHLRKKLADSTDKADLRLIYLALAHMIKFRGHFLIEGDLNPDNSDVDKLFI
QLVQIYNQLFEENPINASRVDAKAILSARLSKSRRLENLIAQLPGEKRNGLFGNLIALSLGL
TPNFKSNFDLAEDAKLQLSKDTYDDDLDNLLAQIGDQYADLFLAAKNLSDAILLSDILRVNS
EITKAPLSASMIKRYDEHHQDLTLLKALVRQQLPEKYKEIFFDQSKNGYAGYIDGGASQEEF
YKFIKPILEKMDGTEELLVKLNREDLLRKQRTFDNGSIPHQIHLGELHAILRRQEDFYPFLK
DNREKIEKILTFRIPYYVGPLARGNSRFAWMTRKSEETITPWNFEEVVDKGASAQSFIERMT
NFDKNLPNEKVLPKHSLLYEYFTVYNELTKVKYVTEGMRKPAFLSGEQKKAIVDLLFKTNRK
VTVKQLKEDYFKKIECFDSVEISGVEDRFNASLGAYHDLLKIIKDKDFLDNEENEDILEDIV
LTLTLFEDRGMIEERLKTYAHLFDDKVMKQLKRRRYTGWGRLSRKLINGIRDKQSGKTILDF
LKSDGFANRNFMQLIHDDSLTFKEDIQKAQVSGQGHSLHEQIANLAGSPAIKKGILQTVKIV
DELVKVMGHKPENIVIEMARENQTTQKGQKNSRERMKRIEEGIKELGSQILKEHPVENTQLQ
NEKLYLYYLQNGRDMYVDQELDINRLSDYDVDHIVPQSFIKDDSIDNKVLTRSDKNRGKSDN
VPSEEVVKKMKNYWRQLLNAKLITQRKFDNLTKAERGGLSELDKAGFIKRQLVETRQITKHV
AQILDSRMNTKYDENDKLIREVKVITLKSKLVSDFRKDFQFYKVREINNYHHAHDAYLNAVV
GTALIKKYPKLESEFVYGDYKVYDVRKMIAKSEQEIGKATAKYFFYSNIMNFFKTEITLANG
EIRKRPLIETNGETGEIVWDKGRDFATVRKVLSMPQVNIVKKTEVQTGGFSKESILPKRNSD
KLIARKKDWDPKKYGGFDSPTVAYSVLVVAKVEKGKSKKLKSVKELLGITIMERSSFEKNPI
DFLEAKGYKEVKKDLIIKLPKYSLFELENGRKRMLASAGELQKGNELALPSKYVNFLYLASH
YEKLKGSPEDNEQKQLFVEQHKHYLDEIIEQISEFSKRVILADANLDKVLSAYNKHRDKPIR
EQAENIIHLFTLTNLGAPAAFKYFDTTIDRKRYTSTKEVLDATLIHQSITGLYETRIDLSQL
GGD

(single underline: HNH domain; double underline: RuvC domain)

[0115] The term “conservative amino acid substitution” or “conservative mutation” refers to the replacement of one amino acid by another amino acid with a common property. A functional way to define common properties between individual amino acids is to analyze the normalized frequencies of amino acid changes between corresponding proteins of homologous organisms (Schulz, G. E. and Schirmer, R. H., Principles of Protein Structure, Springer-Verlag, New York (1979)). According to such analyses, groups of amino acids can be defined where amino acids within a group exchange preferentially with each other, and therefore resemble each other most in their impact on the overall protein structure (Schulz, G. E. and Schirmer, R. H., supra). Non-limiting examples of conservative mutations include amino acid substitutions of amino acids, for example, lysine for arginine and vice versa such that a positive charge can be maintained; glutamic acid for aspartic acid and vice versa such that a negative charge can be maintained; serine for threonine such that a free —OH can be maintained; and glutamine for asparagine such that a free —NH₂ can be maintained.

[0116] The term “coding sequence” or “protein coding sequence” as used interchangeably herein refers to a segment of a polynucleotide that codes for a protein. The region or sequence is bounded nearer the 5′ end by a start codon and nearer the 3′3′ end with a stop codon. Stop codons useful with the base editors described herein include the following:

[0117] Glutamine CAG→TAG Stop codon
[0118] CAA→TAA

[0119] Arginine CGA→TGA

[0120] Tryptophan TGG→TGA
[0121] TGG→TAG
[0122] TGG→TAA
   Coding sequences can also be referred to as open reading frames.

[0123] By “cytidine deaminase” is meant a polypeptide or fragment thereof capable of catalyzing a deamination reaction that converts an amino group to a carbonyl group. In one embodiment, the cytidine deaminase converts cytosine to uracil or 5-methylcytosine to thymine. PmCDA1, which is derived from Petromyzon marinus (Petromyzon marinus cytosine deaminase 1, “PmCDA1”), AID (Activation-induced cytidine deaminase; AICDA), which is derived from a mammal, or different species of a mammal (e.g., human, swine, bovine, horse, monkey, etc.), as well as non-mammals, e.g., alligator, and APOBEC are exemplary cytidine deaminases.

[0124] The term “deaminase” or “deaminase domain,” as used herein, refers to a protein or enzyme that catalyzes a deamination reaction. In some embodiments, the deaminase or deaminase domain is a cytidine deaminase, catalyzing the hydrolytic deamination of cytidine or deoxycytidine to uridine or deoxyuridine, respectively. In some embodiments, the deaminase or deaminase domain is a cytosine deaminase, catalyzing the hydrolytic deamination of cytosine to uracil. In some embodiments, the deaminase is an adenosine deaminase, which catalyzes the hydrolytic deamination of adenine to hypoxanthine. In some embodiments, the deaminase is an adenosine deaminase, which catalyzes the hydrolytic deamination of adenosine or adenine (A) to inosine (I). In some embodiments, the deaminase or deaminase domain is an adenosine deaminase, catalyzing the hydrolytic deamination of adenosine or deoxyadenosine to inosine or deoxyinosine, respectively. In some embodiments, the adenosine deaminase catalyzes the hydrolytic deamination of adenosine in deoxyribonucleic acid (DNA). The adenosine deaminase (e.g., engineered adenosine deaminase, evolved adenosine deaminase) provided herein can be from any organism, such as a bacterium. In some embodiments, the adenosine deaminase is from a bacterium, such as E. coli, S. aureus, S. typhi, S. putrefaciens, H. influenzae, or C. crescentus. In some embodiments, the adenosine deaminase is a TadA deaminase. In some embodiments, the deaminase or deaminase domain is a variant of a naturally occurring deaminase from an organism, such as a human, chimpanzee, gorilla, monkey, cow, dog, rat, or mouse. In some embodiments, the deaminase or deaminase domain does not occur in nature. For example, in some embodiments, the deaminase or deaminase domain is at least 50%, at least 55%, at least 60%, at least 65%, at least 70%, at least 75% at least 80%, at least 85%, at least 90%, at least 91%, at least 92%, at least 93%, at least 94%, at least 95%, at least 96%, at least 97%, at least 98%, at least 99%, at least 99.1%, at least 99.2%, at least 99.3%, at least 99.4%, at least 99.5%, at least 99.6%, at least 99.7%, at least 99.8%, or at least 99.9% identical to a naturally occurring deaminase.

[0125] “Detect” refers to identifying the presence, absence or amount of the analyte to be detected. In one embodiment, a sequence alteration in a polynucleotide or polypeptide is detected. In another embodiment, the presence of indels is detected.

[0126] By “detectable label” is meant a composition that when linked to a molecule of interest renders the latter detectable, via spectroscopic, photochemical, biochemical, immunochemical, or chemical means. For example, useful labels include radioactive isotopes, magnetic beads, metallic beads, colloidal particles, fluorescent dyes, electron-dense reagents, enzymes (for example, as commonly used in an enzyme linked immunosorbent assay (ELISA)), biotin, digoxigenin, or haptens.

[0127] By “disease” is meant any condition or disorder that damages or interferes with the normal function of a cell, tissue, or organ. In particular embodiments, a disease amenable to treatment with compositions of the invention is associated with aberrant splicing. In one particular embodiment, a disease is Shwachman Diamond Syndrome (SDS).

[0128] By “disease associated with aberrant splicing” is meant any condition or disorder associated with a disruption in transcription caused by an alteration in a genetic sequence that affects splicing, such as an alteration in a splice acceptor or splice donor site.

[0129] By “effective amount” is meant the amount of an agent or active compound, e.g., a base editor as described herein, that is required to ameliorate the symptoms of a disease relative to an untreated patient or an individual without disease, i.e., a healthy individual, or is the amount of the agent or active compound sufficient to elicit a desired biological response.

[0130] The effective amount of active compound(s) used to practice the present invention for therapeutic treatment of a disease varies depending upon the manner of administration, the age, body weight, and general health of the subject. Ultimately, the attending physician or veterinarian will decide the appropriate amount and dosage regimen. Such an amount is referred to as an “effective” amount. In one embodiment, an effective amount is the amount of a base editor of the invention sufficient to introduce an alteration in a gene of interest in a cell (e.g., a cell in vitro or in vivo). In one embodiment, an effective amount is the amount of a base editor required to achieve a therapeutic effect. Such therapeutic effect need not be sufficient to alter a pathogenic gene in all cells of a subject, tissue or organ, but only to alter the pathogenic gene in about 1%, 5%, 10%, 25%, 50%, 75% or more of the cells present in a subject, tissue or organ. In one embodiment, an effective amount is sufficient to ameliorate one or more symptoms of a disease.

[0131] In some embodiments, an effective amount of a nucleobase editor comprising a nCas9 domain and a deaminase domain (e.g., adenosine deaminase, cytidine deaminase), which may be in the form of a fusion protein provided herein, or an agent or composition comprising a nucleobase editor comprising a nCas9 domain and a deaminase domain (e.g., adenosine deaminase, cytidine deaminase), refers to the amount that is sufficient to induce editing of a target site specifically bound and edited by the nucleobase editors described herein. As will be appreciated by the skilled artisan, the effective amount of an agent, e.g., a fusion protein, may vary depending on various factors as, for example, on the desired biological response, e.g., on the specific allele, genome, or target site to be edited, on the cell or tissue being targeted, and/or on the agent being used.

[0132] In some embodiments, an effective amount of an agent, e.g., a fusion protein comprising a nCas9 domain and a deaminase domain, which may be in the form of a fusion protein, may refer to the amount of the agent, e.g., the fusion protein, that is sufficient to induce editing of a target site specifically bound and edited by the fusion protein. As will be appreciated by the skilled artisan, the effective amount of an agent, e.g., a fusion protein, a nuclease, a hybrid protein, a protein dimer, a complex of a protein (or protein dimer) and a polynucleotide, or a polynucleotide, may vary depending on various factors as, for example, on the desired biological response, e.g., on the specific allele, genome, or target site to be edited, on the cell or tissue being targeted, and/or on the agent being used.

[0133] By “fragment” is meant a portion of a polypeptide or nucleic acid molecule. This portion contains, at least about 10%, 20%, 30%, 40%, 50%, 60%, 70%, 80%, or 90% of the entire length of the reference nucleic acid molecule or polypeptide. A fragment may contain 10, 20, 30, 40, 50, 60, 70, 80, 90, or 100, 200, 300, 400, 500, 600, 700, 800, 900, or 1000 nucleotides or amino acids.

[0134] By “guide RNA” or “gRNA” is meant a polynucleotide that is specific for a target sequence and can form a complex with a polynucleotide programmable nucleotide binding domain protein (e.g., Cas9 or Cpf1). In an embodiment, the guide polynucleotide is a guide RNA (gRNA). gRNAs can exist as a complex of two or more RNAs, or as a single RNA molecule. gRNAs that exist as a single RNA molecule may be referred to as single-guide RNAs (sgRNAs), although “gRNA” is used interchangeably to refer to guide RNAs that exist as either single molecules or as a complex of two or more molecules. Typically, gRNAs that exist as single RNA species comprise two domains: (1) a domain that shares homology to a target nucleic acid (e.g., and directs binding of a Cas9 complex to the target); and (2) a domain that binds a Cas9 protein. In some embodiments, domain (2) corresponds to a sequence known as a tracrRNA, and comprises a stem-loop structure. For example, in some embodiments, domain (2) is identical or homologous to a tracrRNA as provided in Jinek et al., Science 337:816-821(2012), the entire contents of which is incorporated herein by reference. Other examples of gRNAs (e.g., those including domain 2) can be found in US20160208288, entitled “Switchable Cas9 Nucleases and Uses Thereof,” and U.S. Pat. No. 9,737,604, entitled “Delivery System For Functional Nucleases,” the entire contents of each are hereby incorporated by reference in their entirety. In some embodiments, a gRNA comprises two or more of domains (1) and (2), and may be referred to as an “extended gRNA.” An extended gRNA will bind two or more Cas9 proteins and bind a target nucleic acid at two or more distinct regions, as described herein. The gRNA comprises a nucleotide sequence that complements a target site, which mediates binding of the nuclease/RNA complex to the target site, providing the sequence specificity of the nuclease:RNA complex.

[0135] “Hybridization” means hydrogen bonding, which may be Watson-Crick, Hoogsteen or reversed Hoogsteen hydrogen bonding, between complementary nucleobases. For example, adenine and thymine are complementary nucleobases that pair through the formation of hydrogen bonds.

[0136] By “increases” is meant a positive alteration of at least 10%, 25%, 50%, 75%, or 100%.

[0137] The terms “inhibitor of base repair”, “base repair inhibitor”, “IBR” or their grammatical equivalents refer to a protein that is capable in inhibiting the activity of a nucleic acid repair enzyme, for example a base excision repair enzyme. In some embodiments, the IBR is an inhibitor of inosine base excision repair. Exemplary inhibitors of base repair include inhibitors of APE1, Endo III, Endo IV, Endo V, Endo VIII, Fpg, hOGG1, hNEIL1, T7 Endo1, T4PDG, UDG, hSMUG1, and hAAG. In some embodiments, the base repair inhibitor is an inhibitor of Endo V or hAAG. In some embodiments, the IBR is an inhibitor of Endo V or hAAG. In some embodiments, the IBR is a catalytically inactive EndoV or a catalytically inactive hAAG. In some embodiments, the base repair inhibitor is a catalytically inactive EndoV or a catalytically inactive hAAG. In some embodiments, the base repair inhibitor is uracil glycosylase inhibitor (UGI). UGI refers to a protein that is capable of inhibiting a uracil-DNA glycosylase base-excision repair enzyme. In some embodiments, a UGI domain comprises a wild-type UGI or a fragment of a wild-type UGI. In some embodiments, the UGI proteins provided herein include fragments of UGI and proteins homologous to a UGI or a UGI fragment. In some embodiments, the base repair inhibitor is an inhibitor of inosine base excision repair. In some embodiments, the base repair inhibitor is a “catalytically inactive inosine specific nuclease” or “dead inosine specific nuclease.” Without wishing to be bound by any particular theory, catalytically inactive inosine glycosylases (e.g., alkyl adenine glycosylase (AAG)) can bind inosine, but cannot create an abasic site or remove the inosine, thereby sterically blocking the newly formed inosine moiety from DNA damage/repair mechanisms. In some embodiments, the catalytically inactive inosine specific nuclease can be capable of binding an inosine in a nucleic acid but does not cleave the nucleic acid. Non-limiting exemplary catalytically inactive inosine specific nucleases include catalytically inactive alkyl adenosine glycosylase (AAG nuclease), for example, from a human, and catalytically inactive endonuclease V (EndoV nuclease), for example, from E. coli. In some embodiments, the catalytically inactive AAG nuclease comprises an E125Q mutation or a corresponding mutation in another AAG nuclease.

[0138] An “intein” is a fragment of a protein that is able to excise itself and join the remaining fragments (the exteins) with a peptide bond in a process known as protein splicing. Inteins are also referred to as “protein introns.” The process of an intein excising itself and joining the remaining portions of the protein is herein termed “protein splicing” or “intein-mediated protein splicing.” In some embodiments, an intein of a precursor protein (an intein containing protein prior to intein-mediated protein splicing) comes from two genes. Such intein is referred to herein as a split intein (e.g., split intein-N and split intein-C). For example, in cyanobacteria, DnaE, the catalytic subunit a of DNA polymerase III, is encoded by two separate genes, dnaE-n and dnaE-c. The intein encoded by the dnaE-n gene may be herein referred as “intein-N.” The intein encoded by the dnaE-c gene may be herein referred as “intein-C.”

[0139] Other intein systems may also be used. For example, a synthetic intein based on the dnaE intein, the Cfa-N (e.g., split intein-N) and Cfa-C (e.g., split intein-C) intein pair, has been described (e.g., in Stevens et al., J Am Chem Soc. 2016 Feb. 24; 138(7):2162-5, incorporated herein by reference). Non-limiting examples of intein pairs that may be used in accordance with the present disclosure include: Cfa DnaE intein, Ssp GyrB intein, Ssp DnaX intein, Ter DnaE3 intein, Ter ThyX intein, Rma DnaB intein and Cne Prp8 intein (e.g., as described in U.S. Pat. No. 8,394,604, incorporated herein by reference.

Exemplary nucleotide and amino acid sequences of inteins are provided.

DnaE Intein-N DNA:
TGCCTGTCATACGAAACCGAGATACTGACAGTAGAATATGGCCTTCTGC
CAATCGGGAAGATTGTGGAGAAACGGATAGAATGCACAGTTTACTCTGT
CGATAACAATGGTAACATTTATACTCAGCCAGTTGCCCAGTGGCACGAC
CGGGGAGAGCAGGAAGTATTCGAATACTGTCTGGAGGATGGAAGTCTCA
TTAGGGCCACTAAGGACCACAAATTTATGACAGTCGATGGCCAGATGCT
GCCTATAGACGAAATCTTTGAGCGAGAGTTGGACCTCATGCGAGTTGAC
AACCTTCCTAAT
DnaE Intein-N Protein:
CLSYETEILTVEYGLLPIGKIVEKRIECTVYSVDNNGNIYTQPVAQWHD
RGEQEVFEYCLEDGSLIRATKDHKFMTVDGQMLPIDEIFERELDLMRVD
NL PN
DnaE Intein-C DNA:
ATGATCAAGATAGCTACAAGGAAGTATCTTGGCAAACAAAACGTTTATG
ATATTGGAGTCGAAAGAGATCACAACTTTGCTCTGAAGAACGGATTCAT
AG CTTCTAAT
Intein-C:
MIKIATRKYLGKQNVYDIGVERDHNFALKNGFIASN
Cfa-N DNA:
TGCCTGTCTTATGATACCGAGATACTTACCGTTGAATATGGCTTCTTGC
CTATTGGAAAGATTGTCGAAGAGAGAATTGAATGCACAGTATATACTGT
AGACAAGAATGGTTTCGTTTACACACAGCCCATTGCTCAATGGCACAAT
CGCGGCGAACAAGAAGTATTTGAGTACTGTCTCGAGGATGGAAGCATCA
TACGAGCAACTAAAGATCATAAATTCATGACCACTGACGGGCAGATGTT
GCCAATAGATGAGATATTCGAGCGGGGCTTGGATCTCAAACAAGTGGAT
GGATTGCCA
Cfa-N Protein:
CLSYDTEILTVEYGFLPIGKIVEERIECTVYTVDKNGFVYTQPIAQWHN
RGEQEVFEYCLEDGSIIRATKDHKFMTTDGQMLPIDEIFERGLDLKQVD
GLP
Cfa-C DNA:
ATGAAGAGGACTGCCGATGGATCAGAGTTTGAATCTCCCAAGAAGAAGA
GGAAAGTAAAGATAATATCTCGAAAAAGTCTTGGTACCCAAAATGTCTA
TGATATTGGAGTGGAGAAAGATCACAACTTCCTTCTCAAGAACGGTCTC
GTAGCCAGCAAC
Cfa-CProtein:
MKRTADGSEFESPKKKRKVKIISRKSLGTQNVYDIGVEKDHNFLLKNGL
VASN

[0140] Intein-N and intein-C may be fused to the N-terminal portion of the split Cas9 and the C-terminal portion of the split Cas9, respectively, for the joining of the N-terminal portion of the split Cas9 and the C-terminal portion of the split Cas9. For example, in some embodiments, an intein-N is fused to the C-terminus of the N-terminal portion of the split Cas9, i.e., to form a structure of N—[N-terminal portion of the split Cas9]-[intein-N]—C. In some embodiments, an intein-C is fused to the N-terminus of the C-terminal portion of the split Cas9, i.e., to form a structure of N-[intein-C]—[C-terminal portion of the split Cas9]-C. The mechanism of intein-mediated protein splicing for joining the proteins the inteins are fused to (e.g., split Cas9) is known in the art, e.g., as described in Shah et al., Chem Sci. 2014; 5(1):446-461, incorporated herein by reference. Methods for designing and using inteins are known in the art and described, for example by WO2014004336, WO2017132580, US20150344549, and US20180127780, each of which is incorporated herein by reference in their entirety.

[0141] The terms “isolated,” “purified,” or “biologically pure” refer to material that is free to varying degrees from components which normally accompany it as found in its native state. “Isolate” denotes a degree of separation from original source or surroundings. “Purify” denotes a degree of separation that is higher than isolation. A “purified” or “biologically pure” protein is sufficiently free of other materials such that any impurities do not materially affect the biological properties of the protein or cause other adverse consequences. That is, a nucleic acid or peptide of this invention is purified if it is substantially free of cellular material, viral material, or culture medium when produced by recombinant DNA techniques, or chemical precursors or other chemicals when chemically synthesized. Purity and homogeneity are typically determined using analytical chemistry techniques, for example, polyacrylamide gel electrophoresis or high performance liquid chromatography. The term “purified” can denote that a nucleic acid or protein gives rise to essentially one band in an electrophoretic gel. For a protein that can be subjected to modifications, for example, phosphorylation or glycosylation, different modifications may give rise to different isolated proteins, which can be separately purified.

[0142] By “isolated polynucleotide” is meant a nucleic acid (e.g., a DNA) that is free of the genes which, in the naturally-occurring genome of the organism from which the nucleic acid molecule of the invention is derived, flank the gene. The term therefore includes, for example, a recombinant DNA that is incorporated into a vector; into an autonomously replicating plasmid or virus; or into the genomic DNA of a prokaryote or eukaryote; or that exists as a separate molecule (for example, a cDNA or a genomic or cDNA fragment produced by PCR or restriction endonuclease digestion) independent of other sequences. In addition, the term includes an RNA molecule that is transcribed from a DNA molecule, as well as a recombinant DNA that is part of a hybrid gene encoding additional polypeptide sequence.

[0143] By an “isolated polypeptide” is meant a polypeptide of the invention that has been separated from components that naturally accompany it. Typically, the polypeptide is isolated when it is at least 60%, by weight, free from the proteins and naturally-occurring organic molecules with which it is naturally associated. Preferably, the preparation is at least 75%, more preferably at least 90%, and most preferably at least 99%, by weight, a polypeptide of the invention. An isolated polypeptide of the invention may be obtained, for example, by extraction from a natural source, by expression of a recombinant nucleic acid encoding such a polypeptide; or by chemically synthesizing the protein. Purity can be measured by any appropriate method, for example, column chromatography, polyacrylamide gel electrophoresis, or by HPLC analysis.

[0144] The term “linker”, as used herein, can refer to a covalent linker (e.g., covalent bond), a non-covalent linker, a chemical group, or a molecule linking two molecules or moieties, e.g., two components of a protein complex or a ribonucleocomplex, or two domains of a fusion protein, such as, for example, a polynucleotide programmable DNA binding domain (e.g., dCas9) and a deaminase domain ((e.g., an adenosine deaminase, a cytidine deaminase, or an adenosine deaminase and a cytidine deaminase). A linker can join different components of, or different portions of components of, a base editor system. For example, in some embodiments, a linker can join a guide polynucleotide binding domain of a polynucleotide programmable nucleotide binding domain and a catalytic domain of a deaminase. In some embodiments, a linker can join a CRISPR polypeptide and a deaminase. In some embodiments, a linker can join a Cas9 and a deaminase. In some embodiments, a linker can join a dCas9 and a deaminase. In some embodiments, a linker can join a nCas9 and a deaminase. In some embodiments, a linker can join a guide polynucleotide and a deaminase. In some embodiments, a linker can join a deaminating component and a polynucleotide programmable nucleotide binding component of a base editor system. In some embodiments, a linker can join a RNA-binding portion of a deaminating component and a polynucleotide programmable nucleotide binding component of a base editor system. In some embodiments, a linker can join a RNA-binding portion of a deaminating component and a RNA-binding portion of a polynucleotide programmable nucleotide binding component of a base editor system. A linker can be positioned between, or flanked by, two groups, molecules, or other moieties and connected to each one via a covalent bond or non-covalent interaction, thus connecting the two. In some embodiments, the linker can be an organic molecule, group, polymer, or chemical moiety. In some embodiments, the linker can be a polynucleotide. In some embodiments, the linker can be a DNA linker. In some embodiments, the linker can be a RNA linker. In some embodiments, a linker can comprise an aptamer capable of binding to a ligand. In some embodiments, the ligand may be carbohydrate, a peptide, a protein, or a nucleic acid. In some embodiments, the linker may comprise an aptamer may be derived from a riboswitch. The riboswitch from which the aptamer is derived may be selected from a theophylline riboswitch, a thiamine pyrophosphate (TPP) riboswitch, an adenosine cobalamin (AdoCbl) riboswitch, an S-adenosyl methionine (SAM) riboswitch, an SAH riboswitch, a flavin mononucleotide (FMN) riboswitch, a tetrahydrofolate riboswitch, a lysine riboswitch, a glycine riboswitch, a purine riboswitch, a GlmS riboswitch, or a pre-queosine 1 (PreQ1) riboswitch. In some embodiments, a linker may comprise an aptamer bound to a polypeptide or a protein domain, such as a polypeptide ligand. In some embodiments, the polypeptide ligand may be a K Homology (KH) domain, a MS2 coat protein domain, a PP7 coat protein domain, a SfMu Com coat protein domain, a sterile alpha motif, a telomerase Ku binding motif and Ku protein, a telomerase Sm7 binding motif and Sm7 protein, or a RNA recognition motif. In some embodiments, the polypeptide ligand may be a portion of a base editor system component. For example, a nucleobase editing component may comprise a deaminase domain and a RNA recognition motif.

[0145] In some embodiments, the linker can be an amino acid or a plurality of amino acids (e.g., a peptide or protein). In some embodiments, the linker can be about 5-100 amino acids in length, for example, about 5, 6, 7, 8, 9, 10, 11, 12, 13, 14, 15, 16, 17, 18, 19, 20, 20-30, 30-40, 40-50, 50-60, 60-70, 70-80, 80-90, or 90-100 amino acids in length. In some embodiments, the linker can be about 100-150, 150-200, 200-250, 250-300, 300-350, 350-400, 400-450, or 450-500 amino acids in length. Longer or shorter linkers are also contemplated.

[0146] In some embodiments, a linker joins a gRNA binding domain of an RNA-programmable nuclease, including a Cas9 nuclease domain, and the catalytic domain of a nucleic-acid editing protein (e.g., cytidine or adenosine deaminase). In some embodiments, a linker joins a dCas9 and a nucleic-acid editing protein. For example, the linker is positioned between, or flanked by, two groups, molecules, or other moieties and connected to each one via a covalent bond, thus connecting the two. In some embodiments, the linker is an amino acid or a plurality of amino acids (e.g., a peptide or protein). In some embodiments, the linker is an organic molecule, group, polymer, or chemical moiety. In some embodiments, the linker is 5-200 amino acids in length, for example, 5, 6, 7, 8, 9, 10, 11, 12, 13, 14, 15, 16, 17, 18, 19, 20, 25, 35, 45, 50, 55, 60, 60, 65, 70, 70, 75, 80, 85, 90, 90, 95, 100, 101, 102, 103, 104, 105, 110, 120, 130, 140, 150, 160, 175, 180, 190, or 200 amino acids in length.

[0147] In some embodiments, the domains of a base editor are fused via a linker that comprises the amino acid sequence of SGGSSGSETPGTSESATPESSGGS, SGGSSGGSSGSETPGTSESATPESSGGSSGGS, or GGSGGSPGSPAGSPTSTEEGTSESATPESGPGTSTEPSEGSAPGSPAGSPTSTEEGTSTE PSEGSAPGTSTEPSEGSAPGTSESATPESGPGSEPATSGGSGGS. In some embodiments, domains of the base editor are fused via a linker comprising the amino acid sequence SGSETPGTSESATPES, which may also be referred to as the XTEN linker. In some embodiments, the linker is 24 amino acids in length. In some embodiments, the linker comprises the amino acid sequence SGGSSGGSSGSETPGTSESATPES. In some embodiments, the linker is 40 amino acids in length. In some embodiments, the linker comprises the amino acid sequence SGGSSGGSSGSETPGTSESATPESSGGSSGGSSGGSSGGS. In some embodiments, the linker is 64 amino acids in length. In some embodiments, the linker comprises the amino acid sequence SGGSSGGSSGSETPGTSESATPESSGGSSGGSSGGSSGGSSGSETPGTSESATPESSGGS SGGS. In some embodiments, the linker is 92 amino acids in length. In some embodiments, the linker comprises the amino acid sequence PGSPAGSPTSTEEGTSESATPESGPGTSTEPSEGSAPGSPAGSPTSTEEGTSTEPSEGSAP GTSTEPSEGSAPGTSESATPESGPGSEPATS.

[0148] By “marker” is meant any protein or polynucleotide having an alteration in expression level or activity that is associated with a disease or disorder.

[0149] The term “mutation,” as used herein, refers to a substitution of a residue within a sequence, e.g., a nucleic acid or amino acid sequence, with another residue, or a deletion or insertion of one or more residues within a sequence. In some embodiments, the insertion is a gene conversion that replaces all or a portion of a wild-type sequence. Mutations are typically described herein by identifying the original residue followed by the position of the residue within the sequence and by the identity of the newly substituted residue. Various methods for making the amino acid substitutions (mutations) provided herein are well known in the art, and are provided by, for example, Green and Sambrook, Molecular Cloning: A Laboratory Manual (4th ed., Cold Spring Harbor Laboratory Press, Cold Spring Harbor, N.Y. (2012)).

[0150] In some embodiments, the presently disclosed base editors can efficiently generate an “intended mutation”, such as a point mutation, in a nucleic acid (e.g., a nucleic acid within a genome of a subject) without generating a significant number of unintended mutations, such as unintended point mutations. In some embodiments, an intended mutation is a mutation that is generated by a specific base editor (e.g., cytidine base editor or adenosine base editor) bound to a guide polynucleotide (e.g., gRNA), specifically designed to generate the intended mutation.

[0151] In general, mutations made or identified in a sequence (e.g., an amino acid sequence as described herein) are numbered in relation to a reference (or wild type) sequence, i.e., a sequence that does not contain the mutations. The skilled practitioner in the art would readily understand how to determine the position of mutations in amino acid and nucleic acid sequences relative to a reference sequence.

[0152] The term “non-conservative mutations” involve amino acid substitutions between different groups, for example, lysine for tryptophan, or phenylalanine for serine, etc. In this case, it is preferable for the non-conservative amino acid substitution to not interfere with, or inhibit the biological activity of, the functional variant. The non-conservative amino acid substitution can enhance the biological activity of the functional variant, such that the biological activity of the functional variant is increased as compared to the wild-type protein.

[0153] The term “nuclear localization sequence,” “nuclear localization signal,” or “NLS” refers to an amino acid sequence that promotes import of a protein into the cell nucleus. Nuclear localization sequences are known in the art and described, for example, in Plank et al., International PCT application, PCT/EP2000/011690, filed Nov. 23, 2000, published as WO/2001/038547 on May 31, 2001, the contents of which are incorporated herein by reference for their disclosure of exemplary nuclear localization sequences. In other embodiments, the NLS is an optimized NLS described, for example, by Koblan et al., Nature Biotech. 2018 doi:10.1038/nbt.4172. Optimized sequences useful in the methods of the invention are shown at FIGS. 8A-8E (Koblan et al., supra). In some embodiments, an NLS comprises the amino acid sequence KRTADGSEFESPKKKRKV, KRPAATKKAGQAKKKK, KKTELQTTNAENKTKKL, KRGINDRNFWRGENGRKTR, RKSGKIAAIVVKRPRK, PKKKRKV, or MDSLLMNRRKFLYQFKNVRWAKGRRETYLC.

[0154] The term “nucleobase,” “nitrogenous base,” or “base,” used interchangeably herein, refers to a nitrogen-containing biological compound that forms a nucleoside, which in turn is a component of a nucleotide. The ability of nucleobases to form base pairs and to stack one upon another leads directly to long-chain helical structures such as ribonucleic acid (RNA) and deoxyribonucleic acid (DNA). Five nucleobases—adenine (A), cytosine (C), guanine (G), thymine (T), and uracil (U)—are called primary or canonical. Adenine and guanine are derived from purine, and cytosine, uracil, and thymine are derived from pyrimidine. DNA and RNA can also contain other (non-primary) bases that are modified. Non-limiting exemplary modified nucleobases can include hypoxanthine, xanthine, 7-me thylguanine, 5,6-dihydrouracil, 5-methylcytosine (m5C), and 5-hydromethylcytosine. Hypoxanthine and xanthine can be created through mutagen presence, both of them through deamination (replacement of the amine group with a carbonyl group). Hypoxanthine can be modified from adenine Xanthine can be modified from guanine. Uracil can result from deamination of cytosine. A “nucleoside” consists of a nucleobase and a five carbon sugar (either ribose or deoxyribose). Examples of a nucleoside include adenosine, guanosine, uridine, cytidine, 5-methyluridine (m5U), deoxyadenosine, deoxyguanosine, thymidine, deoxyuridine, and deoxycytidine. Examples of a nucleoside with a modified nucleobase includes inosine (I), xanthosine (X), 7-methylguanosine (m7G), dihydrouridine (D), 5-methylcytidine (m5C), and pseudouridine (Ψ). A “nucleotide” consists of a nucleobase, a five carbon sugar (either ribose or deoxyribose), and at least one phosphate group.

[0155] The terms “nucleic acid” and “nucleic acid molecule,” as used herein, refer to a compound comprising a nucleobase and an acidic moiety, e.g., a nucleoside, a nucleotide, or a polymer of nucleotides. Typically, polymeric nucleic acids, e.g., nucleic acid molecules comprising three or more nucleotides are linear molecules, in which adjacent nucleotides are linked to each other via a phosphodiester linkage. In some embodiments, “nucleic acid” refers to individual nucleic acid residues (e.g. nucleotides and/or nucleosides). In some embodiments, “nucleic acid” refers to an oligonucleotide chain comprising three or more individual nucleotide residues. As used herein, the terms “oligonucleotide” and “polynucleotide” can be used interchangeably to refer to a polymer of nucleotides (e.g., a string of at least three nucleotides). In some embodiments, “nucleic acid” encompasses RNA as well as single and/or double-stranded DNA. Nucleic acids may be naturally occurring, for example, in the context of a genome, a transcript, an mRNA, tRNA, rRNA, siRNA, snRNA, a plasmid, cosmid, chromosome, chromatid, or other naturally occurring nucleic acid molecule. On the other hand, a nucleic acid molecule may be a non-naturally occurring molecule, e.g., a recombinant DNA or RNA, an artificial chromosome, an engineered genome, or fragment thereof, or a synthetic DNA, RNA, DNA/RNA hybrid, or including non-naturally occurring nucleotides or nucleosides. Furthermore, the terms “nucleic acid,” “DNA,” “RNA,” and/or similar terms include nucleic acid analogs, e.g., analogs having other than a phosphodiester backbone. Nucleic acids can be purified from natural sources, produced using recombinant expression systems and optionally purified, chemically synthesized, etc. Where appropriate, e.g., in the case of chemically synthesized molecules, nucleic acids can comprise nucleoside analogs such as analogs having chemically modified bases or sugars, and backbone modifications. A nucleic acid sequence is presented in the 5′ to 3′ direction unless otherwise indicated. In some embodiments, a nucleic acid is or comprises natural nucleosides (e.g. adenosine, thymidine, guanosine, cytidine, uridine, deoxyadenosine, deoxythymidine, deoxyguanosine, and deoxycytidine); nucleoside analogs (e.g., 2-aminoadenosine, 2-thiothymidine, inosine, pyrrolo-pyrimidine, 3-methyl adenosine, 5-methylcytidine, 2-aminoadenosine, C5-bromouridine, C5-fluorouridine, C5-iodouridine, C5-propynyl-uridine, C5-propynyl-cytidine, C5-methylcytidine, 2-aminoadenosine, 7-deazaadenosine, 7-deazaguanosine, 8-oxoadenosine, 8-oxoguanosine, 0(6)-methylguanine, and 2-thiocytidine); chemically modified bases; biologically modified bases (e.g., methylated bases); intercalated bases; modified sugars (2′—e.g., fluororibose, ribose, 2′-deoxyribose, arabinose, and hexose); and/or modified phosphate groups (e.g., phosphorothioates and 5′-N-phosphoramidite linkages).

[0156] The term “nucleic acid programmable DNA binding protein” or “napDNAbp” may be used interchangeably with “polynucleotide programmable nucleotide binding domain” to refer to a protein that associates with a nucleic acid (e.g., DNA or RNA), such as a guide nucleic acid or guide polynucleotide (e.g., gRNA), that guides the napDNAbp to a specific nucleic acid sequence. In some embodiments, the polynucleotide programmable nucleotide binding domain is a polynucleotide programmable DNA binding domain. In some embodiments, the polynucleotide programmable nucleotide binding domain is a polynucleotide programmable RNA binding domain. In some embodiments, the polynucleotide programmable nucleotide binding domain is a Cas9 protein. A Cas9 protein can associate with a guide RNA that guides the Cas9 protein to a specific DNA sequence that is complementary to the guide RNA. In some embodiments, the napDNAbp is a Cas9 domain, for example a nuclease active Cas9, a Cas9 nickase (nCas9), or a nuclease inactive Cas9 (dCas9). Non-limiting examples of nucleic acid programmable DNA binding proteins include, Cas9 (e.g., dCas9 and nCas9), Cas12a/Cpf1, Cas12b/C2c1, Cas12c/C2c3, Cas12d/CasY, Cas12e/CasX, Cas12g, Cas12h, and Cas12i. Non-limiting examples of Cas enzymes include Cas1, Cas1B, Cas2, Cas3, Cas4, Cas5, Cas5d, Cas5t, Cas5h, Cas5a, Cash, Cas7, Cas8, Cas8a, Cas8b, Cas8c, Cas9 (also known as Csn1 or Csx12), Cas10, Cas10d, Cas12a/Cpf1, Cas12b/C2c1, Cas12c/C2c3, Cas12d/CasY, Cas12e/CasX, Cas12g, Cas12h, Cas12i, Csy1, Csy2, Csy3, Csy4, Cse1, Cse2, Cse3, Cse4, Cse5e, Csc1, Csc2, Csa5, Csn1, Csn2, Csm1, Csm2, Csm3, Csm4, Csm5, Csm6, Cmr1, Cmr3, Cmr4, Cmr5, Cmr6, Csb1, Csb2, Csb3, Csx17, Csx14, Csx10, Csx16, CsaX, Csx3, Csx1, Csx1S, Csx11, Csf1, Csf2, CsO, Csf4, Csd1, Csd2, Cst1, Cst2, Csh1, Csh2, Csa1, Csa2, Csa3, Csa4, Csa5, Type II Cas effector proteins, Type V Cas effector proteins, Type VI Cas effector proteins, CARF, DinG, homologues thereof, or modified or engineered versions thereof. Other nucleic acid programmable DNA binding proteins are also within the scope of this disclosure, although they may not be specifically listed in this disclosure. See, e.g., Makarova et al. “Classification and Nomenclature of CRISPR-Cas Systems: Where from Here?” CRISPR J. 2018 October; 1:325-336. doi: 10.1089/crispr.2018.0033; Yan et al., “Functionally diverse type V CRISPR-Cas systems” Science. 2019 Jan. 4; 363(6422):88-91. doi: 10.1126/science.aav7271, the entire contents of each are hereby incorporated by reference.

[0157] The terms “nucleobase editing domain” or “nucleobase editing protein,” as used herein, refers to a protein or enzyme that can catalyze a nucleobase modification in RNA or DNA, such as cytosine (or cytidine) to uracil (or uridine) or thymine (or thymidine), and adenine (or adenosine) to hypoxanthine (or inosine) deaminations, as well as non-templated nucleotide additions and insertions. In some embodiments, the nucleobase editing domain is a deaminase domain (e.g., an adenine deaminase or an adenosine deaminase; or a cytidine deaminase or a cytosine deaminase). In some embodiments, the nucleobase editing domain is more than one deaminase domain (e.g., an adenine deaminase or an adenosine deaminase and a cytidine or a cytosine deaminase). In some embodiments, the nucleobase editing domain can be a naturally occurring nucleobase editing domain. In some embodiments, the nucleobase editing domain can be an engineered or evolved nucleobase editing domain from the naturally occurring nucleobase editing domain. The nucleobase editing domain can be from any organism, such as a bacterium, human, chimpanzee, gorilla, monkey, cow, dog, rat, or mouse.

[0158] As used herein, “obtaining” as in “obtaining an agent” includes synthesizing, isolating, deriving, purchasing, or otherwise acquiring the agent.

[0159] A “patient” or “subject” as used herein refers to a mammalian subject or individual diagnosed with, at risk of having or developing, or suspected of having or developing a disease or a disorder. In some embodiments, a subject having a mutation in a gene encoding SDSP is identified as having or at risk of developing Shwachman Diamond Sydrome (SDS). In some embodiments, the term “patient” refers to a mammalian subject with a higher than average likelihood of developing a disease or a disorder. Exemplary patients can be humans, non-human primates, cats, dogs, pigs, cattle, cats, horses, camels, llamas, goats, sheep, rodents (e.g., mice, rabbits, rats, gerbils, or guinea pigs) and other mammals that can benefit from the therapies disclosed herein. Exemplary human patients can be male and/or female.

[0160] “Patient in need thereof” or “subject in need thereof” is referred to herein as a patient diagnosed with, having, at risk of having, predetermined to have, or suspected of having a disease or disorder, such as SDS.

[0161] The terms “pathogenic mutation”, “pathogenic variant”, “disease casing mutation”, “disease causing variant”, “deleterious mutation”, or “predisposing mutation” refers to a genetic alteration or mutation that increases an individual's susceptibility or predisposition to a certain disease or disorder. In some embodiments, the pathogenic mutation comprises an alteration in a splice acceptor or splice donor site in a polynucleotide encoding a SBDS protein. In some embodiments, the pathogenic mutation alters the splicing of a polynucleotide encoding a SBDS protein, that results in, for example, protein truncation or that otherwise that negatively effects SBDS protein expression or activity.

[0162] The terms “protein”, “peptide”, “polypeptide”, and their grammatical equivalents are used interchangeably herein, and refer to a polymer of amino acid residues linked together by peptide (amide) bonds. The terms refer to a protein, peptide, or polypeptide of any size, structure, or function. Typically, a protein, peptide, or polypeptide will be at least three amino acids long. A protein, peptide, or polypeptide can refer to an individual protein or a collection of proteins. One or more of the amino acids in a protein, peptide, or polypeptide can be modified, for example, by the addition of a chemical entity such as a carbohydrate group, a hydroxyl group, a phosphate group, a farnesyl group, an isofarnesyl group, a fatty acid group, a linker for conjugation, functionalization, or other modifications, etc. A protein, peptide, or polypeptide can also be a single molecule or can be a multi-molecular complex. A protein, peptide, or polypeptide can be just a fragment of a naturally occurring protein or peptide. A protein, peptide, or polypeptide can be naturally occurring, recombinant, or synthetic, or any combination thereof. The term “fusion protein” as used herein refers to a hybrid polypeptide which comprises protein domains from at least two different proteins. One protein can be located at the amino-terminal (N-terminal) portion of the fusion protein or at the carboxy-terminal (C-terminal) protein thus forming an amino-terminal fusion protein or a carboxy-terminal fusion protein, respectively. A protein can comprise different domains, for example, a nucleic acid binding domain (e.g., the gRNA binding domain of Cas9 that directs the binding of the protein to a target site) and a nucleic acid cleavage domain, or a catalytic domain of a nucleic acid editing protein. In some embodiments, a protein comprises a proteinaceous part, e.g., an amino acid sequence constituting a nucleic acid binding domain, and an organic compound, e.g., a compound that can act as a nucleic acid cleavage agent. In some embodiments, a protein is in a complex with, or is in association with, a nucleic acid, e.g., RNA or DNA. Any of the proteins provided herein can be produced by any method known in the art. For example, the proteins provided herein can be produced via recombinant protein expression and purification, which is especially suited for fusion proteins comprising a peptide linker. Methods for recombinant protein expression and purification are well known, and include those described by Green and Sambrook, Molecular Cloning: A Laboratory Manual (4th ed., Cold Spring Harbor Laboratory Press, Cold Spring Harbor, N.Y. (2012)), the entire contents of which are incorporated herein by reference.

[0163] Polypeptides and proteins disclosed herein (including functional portions and functional variants thereof) can comprise synthetic amino acids in place of one or more naturally-occurring amino acids. Such synthetic amino acids are known in the art, and include, for example, aminocyclohexane carboxylic acid, norleucine, α-amino n-decanoic acid, homoserine, S-acetylaminomethyl-cysteine, trans-3- and trans-4-hydroxyproline, 4-aminophenylalanine, 4-nitrophenylalanine, 4-chlorophenylalanine, 4-carboxyphenylalanine, β-phenylserine β-hydroxyphenylalanine, phenylglycine, α-naphthylalanine, cyclohexylalanine, cyclohexylglycine, indoline-2-carboxylic acid, 1,2,3,4-tetrahydroisoquinoline-3-carboxylic acid, aminomalonic acid, aminomalonic acid monoamide, N′-benzyl-N′-methyl-lysine, N′,N′-dibenzyl-lysine, 6-hydroxylysine, ornithine, α-aminocyclopentane carboxylic acid, α-aminocyclohexane carboxylic acid, α-aminocycloheptane carboxylic acid, α-(2-amino-2-norbornane)-carboxylic acid, α,γ-diaminobutyric acid, α,β-diaminopropionic acid, homophenylalanine, and α-tert-butylglycine. The polypeptides and proteins can be associated with post-translational modifications of one or more amino acids of the polypeptide constructs. Non-limiting examples of post-translational modifications include phosphorylation, acylation including acetylation and formylation, glycosylation (including N-linked and O-linked), amidation, hydroxylation, alkylation including methylation and ethylation, ubiquitylation, addition of pyrrolidone carboxylic acid, formation of disulfide bridges, sulfation, myristoylation, palmitoylation, isoprenylation, farnesylation, geranylation, glypiation, lipoylation and iodination.

[0164] The term “recombinant” as used herein in the context of proteins or nucleic acids refers to proteins or nucleic acids that do not occur in nature, but are the product of human engineering. For example, in some embodiments, a recombinant protein or nucleic acid molecule comprises an amino acid or nucleotide sequence that comprises at least one, at least two, at least three, at least four, at least five, at least six, or at least seven mutations as compared to any naturally occurring sequence.

[0165] By “reduces” is meant a negative alteration of at least 10%, 25%, 50%, 75%, or 100%.

[0166] By “reference” is meant a standard or control condition. In one embodiment, the reference is a wild-type or healthy cell. By way of example, a wild-type or healthy cell may be derived or obtained from a subject who is healthy and/or disease-free. In particular embodiments, a wild-type or healthy cell is a cell that expresses a wild-type SBDS protein (i.e., a SBDS protein that is the product of a wild-type SBDS gene that exhibits wild-type splicing). In other embodiments and without limitation, a reference is an untreated cell that is not subjected to a test condition, or is subjected to placebo or normal saline, medium, buffer, and/or a control vector that does not harbor a polynucleotide of interest.

[0167] A “reference sequence” is a defined sequence used as a basis for sequence comparison. A reference sequence may be a subset of or the entirety of a specified sequence; for example, a segment of a full-length cDNA or gene sequence, or the complete cDNA or gene sequence. For polypeptides, the length of the reference polypeptide sequence will generally be at least about 16 amino acids, at least about 20 amino acids, at least about 25 amino acids, about 35 amino acids, about 50 amino acids, or about 100 amino acids. For nucleic acids, the length of the reference nucleic acid sequence will generally be at least about 50 nucleotides, at least about 60 nucleotides, at least about 75 nucleotides, about 100 nucleotides or about 300 nucleotides or any integer thereabout or therebetween. In some embodiments, a reference sequence is a wild-type sequence of a protein of interest. In other embodiments, a reference sequence is a polynucleotide sequence encoding a wild-type protein.

[0168] The term “RNA-programmable nuclease,” and “RNA-guided nuclease” are used with (e.g., binds or associates with) one or more RNA(s) that is not a target for cleavage. In some embodiments, an RNA-programmable nuclease, when in a complex with an RNA, may be referred to as a nuclease:RNA complex. Typically, the bound RNA(s) is referred to as a guide RNA (gRNA). In some embodiments, the RNA-programmable nuclease is the (CRISPR-associated system) Cas9 endonuclease, for example, Cas9 (Csn1) from Streptococcus pyogenes (See, e.g., “Complete genome sequence of an M1 strain of Streptococcus pyogenes.” Ferretti J. J., McShan W. M., Ajdic D. J., Savic D. J., Savic G., Lyon K., Primeaux C, Sezate S., Suvorov A. N., Kenton S., Lai H. S., Lin S. P., Qian Y., Jia H. G., Najar F. Z., Ren Q., Zhu H., Song L., White J., Yuan X., Clifton S. W., Roe B. A., McLaughlin R. E., Proc. Natl. Acad. Sci. U.S.A. 98:4658-4663(2001); “CRISPR RNA maturation by trans-encoded small RNA and host factor RNase III.” Deltcheva E., Chylinski K., Sharma C M., Gonzales K., Chao Y., Pirzada Z. A., Eckert M. R., Vogel J., Charpentier E., Nature 471:602-607(2011).

[0169] By “Shwachman Bodian Diamond Syndrome (SBDS) protein” is meant a polypeptide or fragment thereof having at least about 85% amino acid sequence identity to NCBI Accession No. NP_057122.2 and having SBDS biologic activity. In various embodiments, SBDS biologic activity refers to playing a role in RNA processing, generating ribosomes, or binding to an antibody that specifically binds an SBDS protein.

[0170] An exemplary amino acid sequence of an SBDS protein is provided below:

MSIFTPTNQI RLTNVAVVRM KRAGKRFEIA CYKNKVVGWR
SGVEKDLDEV LQTHSVFVNV SKGQVAKKED LISAFGTDDQ
TEICKQILTK GEVQVSDKER HTQLEQMFRD IATIVADKCV
NPETKRPYTV ILIERAMKDI HYSVKTNKST KQQALEVIKQ
LKEKMKIERA HMRLRFILPV NEGKKLKEKL KPLIKVIESE
DYGQQLEIVC LIDPGCFREI DELIKKETKG KGSLEVLNLK
DVEEGDEKFE.

In particular embodiments, an SBDS protein includes a protein truncation.

[0171] By “Shwachman Bodian Diamond Syndrome (SBDS) polynucleotide” is meant a nucleic acid sequence encoding an SBDS protein. An exemplary SBDS polynucleotide sequence is provided at NM_016038.2, which is reproduced below. The SBDS polynucleotide open reading frame (ORF) extends from nucleotide 185 to 937 (shown in underline).

GTAAGTAAGC CTGCCAGACA CACTGTGACG GCTGCCTGAA
GCTAGTGAGT CGCGGCGCCG CGCACTGGTG GTTGGGTCAG
TGCCGCGCGC CGATCGGTCG TTACCGCGAG GCGCTGGTGG
CCTTCAGGCT GGACGGCGCG GGTCAGCCCT GGTTCGCCGG
CTTCTGGGTC TTTGAACAGC CGCGATGTCG ATCTTCACCC
CCACCAACCA GATCCGCCTA ACCAATGTGG CCGTGGTACG
GATGAAGCGT GCCGGGAAGC GCTTCGAAAT CGCCTGCTAC
AAAAACAAGG TCGTCGGCTG GCGGAGCGGC GTGGAAAAAG
ACCTCGATGA AGTTCTGCAG ACCCACTCAG TGTTTGTAAA
TGTTTCTAAA GGTCAGGTTG CCAAAAAGGA AGATCTCATC
AGTGCGTTTG GAACAGATGA CCAAACTGAA ATCTGTAAGC
AGATTTTGAC TAAAGGAGAA GTTCAAGTAT CAGATAAAGA
AAGACACACA CAACTGGAGC AGATGTTTAG GGACATTGCA
ACTATTGTGG CAGACAAATG TGTGAATCCT GAAACAAAGA
GACCATACAC CGTGATCCTT ATTGAGAGAG CCATGAAGGA
CATCCACTAT TCGGTGAAAA CCAACAAGAG TACAAAACAG
CAGGCTTTGG AAGTGATAAA GCAGTTAAAA GAGAAAATGA
AGATAGAACG TGCTCACATG AGGCTTCGGT TCATCCTTCC
AGTCAATGAA GGCAAGAAGC TGAAAGAAAA GCTCAAGCCA
CTGATCAAGG TCATAGAAAG TGAAGATTAT GGCCAACAGT
TAGAAATCGT ATGTCTGATT GACCCGGGCT GCTTCCGAGA
AATTGATGAG CTAATAAAAA AGGAAACTAA AGGCAAAGGT
TCTTTGGAAG TACTCAATCT GAAAGATGTA GAAGAAGGAG
ATGAGAAATT TGAATGACAC CCATCAATCT CTTCACCTCT
AAAACACTAA AGTGTTTCCG TTTCCGACGG CACTGTTTCA
TGTCTGTGGT CTGCCAAATA CTTGCTTAAA CTATTTGACA
TTTTCTATCT TTGTGTTAAC AGTGGACACA GCAAGGCTTT
CCTACATAAG TATAATAATG TGGGAATGAT TTGGTTTTAA
TTATAAACTG GGGTCTAAAT CCTAAAGCAA AATTGAAACT
CCAAGATGCA AAGTCCAGAG TGGCATTTTG CTACTCTGTC
TCATGCCTTG ATAGCTTTCC AAAATGAAAG TTACTTGAGG
CAGCTCTTGT GGGTGAAAAG TTATTTGTAC AGTAGAGTAA
GATTATTAGG GGTATGTCTA TACAACAAAA GGGGGGGTCT
TTCCTAAAAA AGAAAACATA TGATGCTTCA TTTCTACTTA
ATGGAACTTG TGTTCTGAGG GTCATTATGG TATCGTAATG
TAAAGCTTGG ATGATGTTCC TGATTATCTG AGAAACAGAT
ATAGAAAAAT TGTGCCGGAC TTACCTTTCA TTGAACATGC
TGCCATAACT TAGATTATTC TTGGTTAAAA AATAAAAGTC
ACTTATTTCT AATTCTTAAA GTTTATAATA TATATTAATA
TAGCTAAAAT TGTATGTAAT CAATAAAACC ACTCTTATGT
TTATT

[0172] In some embodiments, a Shwachman Bodian Diamond Syndrome (SBDS) polynucleotide comprises polynucleotides derived from a SBDS pseudogene. In some embodiments an SBDS polynucleotide comprises mutations resulting from a gene conversion associated with SDS (e.g., a 258+2T>C and/or a 183-184TA>CT mutation), alone or in combination with other alterations present in a SBDS pseudo gene.

[0173] By “Shwachman Bodian Diamond Syndrome (SBDS) pseudogene” is meant a nucleic acid sequence having at least about 85% nucleic acid sequence identity to an SBDS polynucleotide. In one embodiment, exemplary pseudo genes include the following and fragments thereof:

>NR_024109.1 Homo sapiens SBDS pseudogene 1 (SBDSP1), transcript variant 4,
non-coding RNA
CCTTTTTGGGCGTGGAAAGATGGCGGTAAAAGCCACAATGCGCAGGCGTCATCGCTCACTTCTCCCCTCC
CGGCTTCTGCTCCACCTGACGCCTGCGCAGTAAGTAAGCCTGCCAGACACGCTGTGGCGGCTGCCTGAAG
CTAGTGAGTCGCGGCGCCGCGCACTTGTGGTTGGGTCAGTGCCGCGCGCCGCTCGGTCGTTACCGCGAGG
CGCTGGTGGCCTTCAGGCTGGACGGCGCGGGTCAGCCCTGGTTTGCCGGCTTCTGGGTCTTTGAACAGCC
GCGATGTCGATCTTCACCCCCACCAACCAGATCCGCCTAACCAATGTGGCCGTGGTACGGATGAAGCGCG
CCAGGAAGCGCTTCGAAATCGCCTGCTACAGAAACAAGGTCGTCGGCTGGCGGAGCGGCTTATTTTGACT
AAAGGAGAAGTTCAAGTATCAGATAAAGACACACACAACTGGAGCAGATGTTTAGGGACATTGCAATTAT
TGTGGCAGACAAATGTGTGACTCCTGAAACAAAGAGACCATACACCGTGATCCTTATTGAGAGAGCCATG
AAGGACATCCACTATTTGGTGAAAACCAACAGGAGTACAAAACAGCAGGCTTTGGAAGTGATAAAGCAGT
TAAAAGAGAAAATGAAGATAGAACGTGCTCACATGAGGCTTCAGTTCATCCTTCCAGTGAATGAAGGCAA
GAAGCTGAAAGAAAAGCTCAAGCCACTGATCAAGGTCATAGAAAGTAAAGATTATGGCCAACAGTTAGAA
ATCGTAAGAGTCAAATATTTTCTTTGCTTCATGTTACCTAAATATTGTATTCTCTAGTAATAAATTTGTA
GCAAACATTC
>NR_024110.1 Homo sapiens SBDS pseudogene 1 (SBDSP1), transcript variant 1,
non-coding RNA
CCTTTTTGGGCGTGGAAAGATGGCGGTAAAAGCCACAATGCGCAGGCGTCATCGCTCACTTCTCCCCTCC
CGGCTTCTGCTCCACCTGACGCCTGCGCAGTAAGTAAGCCTGCCAGACACGCTGTGGCGGCTGCCTGAAG
CTAGTGAGTCGCGGCGCCGCGCACTTGTGGTTGGGTCAGTGCCGCGCGCCGCTCGGTCGTTACCGCGAGG
CGCTGGTGGCCTTCAGGCTGGACGGCGCGGGTCAGCCCTGGTTTGCCGGCTTCTGGGTCTTTGAACAGCC
GCGATGTCGATCTTCACCCCCACCAACCAGATCCGCCTAACCAATGTGGCCGTGGTACGGATGAAGCGCG
CCAGGAAGCGCTTCGAAATCGCCTGCTACAGAAACAAGGTCGTCGGCTGGCGGAGCGGCTTGGAAAAAGA
CCTTGATGAAGTTCTGCAGACCCACTCAGTGTTTGTAAATGTTTCCTAAGGTCAGGTTGCCAAGAAGGAA
GATCTCATCAGTGCGTTTGGAACAGATGACCAAACTGAAATCTATTTTGACTAAAGGAGAAGTTCAAGTA
TCAGATAAAGACACACACAACTGGAGCAGATGTTTAGGGACATTGCAATTATTGTGGCAGACAAATGTGT
GACTCCTGAAACAAAGAGACCATACACCGTGATCCTTATTGAGAGAGCCATGAAGGACATCCACTATTTG
GTGAAAACCAACAGGAGTACAAAACAGCAGGCTTTGGAAGTGATAAAGCAGTTAAAAGAGAAAATGAAGA
TAGAACGTGCTCACATGAGGCTTCAGTTCATCCTTCCAGTGAATGAAGGCAAGAAGCTGAAAGAAAAGCT
CAAGCCACTGATCAAGGTCATAGAAAGTAAAGATTATGGCCAACAGTTAGAAATCGTATGTCTGATTGAC
CTGGGCTGCTTCCGAGAAATTGATGAGCTAATAAAAAAGGAAACCAAAGGCAAAGGTTCTTTGGAAGTAC
TCAATCTGAAAGATTTGAAGAAGGAGATGAGAAATTTGAATGACACCCATCAGTCTCTTCACCTCTAAAA
CACTAAAGTGTTTTCGTTTCCAACAGCACTGTTTCATGTCTGTGGTCTGCCAAATACTTGCTCAAACTAT
TTGACATTTTCTATCTTTGTGTTAACAGTGGACACAGCAAGGCTTTCCTACATAAGTATAATAATGTGGG
AATGATTTGGTTTTAATTATAAACTGGGGTCTAAATCCTAAAGCAAAATTGAAACTCCAGGATGCAAAAT
CCAGAGTGGCATTTTGCTACTCTGTCTCATGCCTTGATAGCTTTCCAAAATGAAAGTTACTTGAGGCAGC
TCTTGTGGGTGAAAAGTTTTTTGTACAGTAGAGTAAGATTATTAGGGGTATGTCTATACGACAAAAGGGG
GGTCTTTCCTAAAAAAGAAAACATGATGCTTCATTTCTACTTAATGGAACTTGTGTTCTGAGGGTCATTA
TGGTATCGTAATATAAAGCTTGGATGATGTTCCTGATTATCTGAGAAACAGATATAGAAAAATTGTGTCG
GACTTAAATAATTTTCGTTGAACATGCTGCCATAACTTAGATTATTCTTGGTTAAAAAATAAAAGTCACT
TATTTCTAATTCTTAAAGTTTATAATATATATTAATATAGCTAAAATTGTATGTAATCAATAAAACCACT
CTTATGTTTATTAPACTATGGCTTGTGTTTCTAGAC
>NR_024111.1 Homo sapiens SBDS pseudogene 1 (SBDSP1), transcript variant 2,
non-coding RNA
CCTTTTTGGGCGTGGAAAGATGGCGGTAAAAGCCACAATGCGCAGGCGTCATCGCTCACTTCTCCCCTCC
CGGCTTCTGCTCCACCTGACGCCTGCGCAGTAAGTAAGCCTGCCAGACACGCTGTGGCGGCTGCCTGAAG
CTAGTGAGTCGCGGCGCCGCGCACTTGTGGTTGGGTCAGTGCCGCGCGCCGCTCGGTCGTTACCGCGAGG
CGCTGGTGGCCTTCAGGCTGGACGGCGCGGGTCAGCCCTGGTTTGCCGGCTTCTGGGTCTTTGAACAGCC
GCGATGTCGATCTTCACCCCCACCAACCAGATCCGCCTAACCAATGTGGCCGTGGTACGGATGAAGCGCG
CCAGGAAGCGCTTCGAAATCGCCTGCTACAGAAACAAGGTCGTCGGCTGGCGGAGCGGCTTATTTTGACT
AAAGGAGAAGTTCAAGTATCAGATAAAGACACACACAACTGGAGCAGATGTTTAGGGACATTGCAATTAT
TGTGGCAGACAAATGTGTGACTCCTGAAACAAAGAGACCATACACCGTGATCCTTATTGAGAGAGCCATG
AAGGACATCCACTATTTGGTGAAAACCAACAGGAGTACAAAACAGCAGGCTTTGGAAGTGATAAAGCAGT
TAAAAGAGAAAATGAAGATAGAACGTGCTCACATGAGGCTTCAGTTCATCCTTCCAGTGAATGAAGGCAA
GAAGCTGAAAGAAAAGCTCAAGCCACTGATCAAGGTCATAGAAAGTAAAGATTATGGCCAACAGTTAGAA
ATCGTATGTCTGATTGACCTGGGCTGCTTCCGAGAAATTGATGAGCTAATAAAAAAGGAAACCAAAGGCA
AAGGTTCTTTGGAAGTACTCAATCTGAAAGATTTGAAGAAGGAGATGAGAAATTTGAATGACACCCATCA
GTCTCTTCACCTCTAAAACACTAAAGTGTTTTCGTTTCCAACAGCACTGTTTCATGTCTGTGGTCTGCCA
AATACTTGCTCAAACTATTTGACATTTTCTATCTTTGTGTTAACAGTGGACACAGCAAGGCTTTCCTACA
TAAGTATAATAATGTGGGAATGATTTGGTTTTAATTATAAACTGGGGTCTAAATCCTAAAGCAAAATTGA
AACTCCAGGATGCAAAATCCAGAGTGGCATTTTGCTACTCTGTCTCATGCCTTGATAGCTTTCCAAAATG
AAAGTTACTTGAGGCAGCTCTTGTGGGTGAAAAGTTTTTTGTACAGTAGAGTAAGATTATTAGGGGTATG
TCTATACGACAAAAGGGGGGTCTTTCCTAAAAAAGAAAACATGATGCTTCATTTCTACTTAATGGAACTT
GTGTTCTGAGGGTCATTATGGTATCGTAATATAAAGCTTGGATGATGTTCCTGATTATCTGAGAAACAGA
TATAGAAAAATTGTGTCGGACTTAAATAATTTTCGTTGAACATGCTGCCATAACTTAGATTATTCTTGGT
TAAAAAATAAAAGTCACTTATTTCTAATTCTTAAAGTTTATAATATATATTAATATAGCTAAAATTGTAT
GTAATCAATAAAACCACTCTTATGTTTATTAAACTATGGCTTGTGTTTCTAGACAA
>NR_001588.2 Homo sapiens SBDS pseudogene 1 (SBDSP1), transcript variant 3,
non-coding RNA
CCTTTTTGGGCGTGGAAAGATGGCGGTAAAAGCCACAATGCGCAGGCGTCATCGCTCACTTCTCCCCTCC
CGGCTTCTGCTCCACCTGACGCCTGCGCAGTAAGTAAGCCTGCCAGACACGCTGTGGCGGCTGCCTGAAG
CTAGTGAGTCGCGGCGCCGCGCACTTGTGGTTGGGTCAGTGCCGCGCGCCGCTCGGTCGTTACCGCGAGG
CGCTGGTGGCCTTCAGGCTGGACGGCGCGGGTCAGCCCTGGTTTGCCGGCTTCTGGGTCTTTGAACAGCC
GCGATGTCGATCTTCACCCCCACCAACCAGATCCGCCTAACCAATGTGGCCGTGGTACGGATGAAGCGCG
CCAGGAAGCGCTTCGAAATCGCCTGCTACAGAAACAAGGTCGTCGGCTGGCGGAGCGGCTTGGAAAAAGA
CCTTGATGAAGTTCTGCAGACCCACTCAGTGTTTGTAAATGTTTCCTAAGGTCAGGTTGCCAAGAAGGAA
GATCTCATCAGTGCGTTTGGAACAGATGACCAAACTGAAATCTATTTTGACTAAAGGAGAAGTTCAAGTA
TCAGATAAAGACACACACAACTGGAGCAGATGTTTAGGGACATTGCAATTATTGTGGCAGACAAATGTGT
GACTCCTGAAACAAAGAGACCATACACCGTGATCCTTATTGAGAGAGCCATGAAGGACATCCACTATTTG
GTGAAAACCAACAGGAGTACAAAACAGCAGGCTTTGGAAGTGATAAAGCAGTTAAAAGAGAAAATGAAGA
TAGAACGTGCTCACATGAGGCTTCAGTTCATCCTTCCAGTGAATGAAGGCAAGAAGCTGAAAGAAAAGCT
CAAGCCACTGATCAAGGTCATAGAAAGTAAAGATTATGGCCAACAGTTAGAAATCGTAAGAGTCAAATAT
TTTCTTTGCTTCATGTTACCTAAATATTGTATTCTCTAGTAATAAATTTGTAGCAAACATTCAAAAAAAA

[0174] The term “single nucleotide polymorphism (SNP)” is a variation in a single nucleotide that occurs at a specific position in the genome, where each variation is present to some appreciable degree within a population (e.g., >1%). For example, at a specific base position in the human genome, the C nucleotide can appear in most individuals, but in a minority of individuals, the position is occupied by an A. This means that there is a SNP at this specific position, and the two possible nucleotide variations, C or A, are said to be alleles for this position. SNPs underlie differences in susceptibility to disease. The severity of illness and the way our body responds to treatments are also manifestations of genetic variations. SNPs can fall within coding regions of genes, non-coding regions of genes, or in the intergenic regions (regions between genes). In some embodiments, SNPs within a coding sequence do not necessarily change the amino acid sequence of the protein that is produced, due to degeneracy of the genetic code. SNPs in the coding region are of two types: synonymous and nonsynonymous SNPs. Synonymous S NPs do not affect the protein sequence, while nonsynonymous SNPs change the amino acid sequence of protein. The nonsynonymous SNPs are of two types: missense and nonsense. SNPs that are not in protein-coding regions can still affect gene splicing, transcription factor binding, messenger RNA degradation, or the sequence of noncoding RNA. Gene expression affected by this type of SNP is referred to as an eSNP (expression SNP) and can be upstream or downstream from the gene. A single nucleotide variant (SNV) is a variation in a single nucleotide without any limitations of frequency and can arise in somatic cells. A somatic single nucleotide variation can also be called a single-nucleotide alteration.

[0175] By “specifically binds” is meant a nucleic acid molecule, polypeptide, or complex thereof (e.g., a nucleic acid programmable DNA binding protein and guide nucleic acid), compound, or molecule that recognizes and binds a polypeptide and/or nucleic acid molecule of the invention, but which does not substantially recognize and bind other molecules in a sample, for example, a biological sample.

[0176] Nucleic acid molecules useful in the methods of the invention include any nucleic acid molecule that encodes a polypeptide of the invention or a fragment thereof. Such nucleic acid molecules need not be 100% identical with an endogenous nucleic acid sequence, but will typically exhibit substantial identity. Polynucleotides having “substantial identity” to an endogenous sequence are typically capable of hybridizing with at least one strand of a double-stranded nucleic acid molecule. Nucleic acid molecules useful in the methods of the invention include any nucleic acid molecule that encodes a polypeptide of the invention or a fragment thereof. Such nucleic acid molecules need not be 100% identical with an endogenous nucleic acid sequence, but will typically exhibit substantial identity. Polynucleotides having “substantial identity” to an endogenous sequence are typically capable of hybridizing with at least one strand of a double-stranded nucleic acid molecule. “Hybridizing” refers to pairing to form a double-stranded molecule between complementary polynucleotide sequences (e.g., a gene described herein), or portions thereof, under various conditions of stringency. (See, e.g., Wahl, G. M. and S. L. Berger (1987) Methods Enzymol. 152:399; Kimmel, A. R. (1987) Methods Enzymol. 152:507).

[0177] For example, stringent salt concentration will ordinarily be less than about 750 mM NaCl and 75 mM trisodium citrate, preferably less than about 500 mM NaCl and 50 mM trisodium citrate, and more preferably less than about 250 mM NaCl and 25 mM trisodium citrate. Low stringency hybridization can be obtained in the absence of organic solvent, e.g., formamide, while high stringency hybridization can be obtained in the presence of at least about 35% formamide, and more preferably at least about 50% formamide. Stringent temperature conditions will ordinarily include temperatures of at least about 30° C., more preferably of at least about 37° C., and most preferably of at least about 42° C. Varying additional parameters, such as hybridization time, the concentration of detergent, e.g., sodium dodecyl sulfate (SDS), and the inclusion or exclusion of carrier DNA, are well known to those skilled in the art. Various levels of stringency are accomplished by combining these various conditions as needed. In a preferred: embodiment, hybridization will occur at 30° C. in 750 mM NaCl, 75 mM trisodium citrate, and 1% SDS. In a more preferred embodiment, hybridization will occur at 37° C. in 500 mM NaCl, 50 mM trisodium citrate, 1% SDS, 35% formamide, and 100 μg/ml denatured salmon sperm DNA (ssDNA). In a most preferred embodiment, hybridization will occur at 42° C. in 250 mM NaCl, 25 mM trisodium citrate, 1% SDS, 50% formamide, and 200 μg/ml ssDNA. Useful variations on these conditions will be readily apparent to those skilled in the art.

[0178] For most applications, washing steps that follow hybridization will also vary in stringency. Wash stringency conditions can be defined by salt concentration and by temperature. As above, wash stringency can be increased by decreasing salt concentration or by increasing temperature. For example, stringent salt concentration for the wash steps will preferably be less than about 30 mM NaCl and 3 mM trisodium citrate, and most preferably less than about 15 mM NaCl and 1.5 mM trisodium citrate. Stringent temperature conditions for the wash steps will ordinarily include a temperature of at least about 25° C., more preferably of at least about 42° C., and even more preferably of at least about 68° C. In an embodiment, wash steps will occur at 25° C. in 30 mM NaCl, 3 mM trisodium citrate, and 0.1% SDS. In another embodiment, wash steps will occur at 42 C in 15 mM NaCl, 1.5 mM trisodium citrate, and 0.1% SDS. In a more preferred embodiment, wash steps will occur at 68° C. in 15 mM NaCl, 1.5 mM trisodium citrate, and 0.1% SDS. Additional variations on these conditions will be readily apparent to those skilled in the art. Hybridization techniques are well known to those skilled in the art and are described, for example, in Benton and Davis (Science 196:180, 1977); Grunstein and Hogness (Proc. Natl. Acad. Sci., USA 72:3961, 1975); Ausubel et al. (Current Protocols in Molecular Biology, Wiley Interscience, New York, 2001); Berger and Kimmel (Guide to Molecular Cloning Techniques, 1987, Academic Press, New York); and Sambrook et al., Molecular Cloning: A Laboratory Manual, Cold Spring Harbor Laboratory Press, New York.

[0179] By “split” is meant divided into two or more fragments.

[0180] A “split Cas9 protein” or “split Cas9” refers to a Cas9 protein that is provided as an N-terminal fragment and a C-terminal fragment encoded by two separate nucleotide sequences. The polypeptides corresponding to the N-terminal portion and the C-terminal portion of the Cas9 protein may be spliced to form a “reconstituted” Cas9 protein. In particular embodiments, the Cas9 protein is divided into two fragments within a disordered region of the protein, e.g., as described in Nishimasu et al., Cell, Volume 156, Issue 5, pp. 935-949, 2014, or as described in Jiang et al. (2016) Science 351: 867-871. PDB file: 5F9R, each of which is incorporated herein by reference. In some embodiments, the protein is divided into two fragments at any C, T, A, or S within a region of SpCas9 between about amino acids A292-G364, F445-K483, or E565-T637, or at corresponding positions in any other Cas9, Cas9 variant (e.g., nCas9, dCas9), or other napDNAbp. In some embodiments, protein is divided into two fragments at SpCas9 T310, T313, A456, S469, or C574. In some embodiments, the process of dividing the protein into two fragments is referred to as “splitting” the protein.

[0181] In other embodiments, the N-terminal portion of the Cas9 protein comprises amino acids 1-573 or 1-637 S. pyogenes Cas9 wild-type (SpCas9) (NCBI Reference Sequence: NC_002737.2, Uniprot Reference Sequence: Q99ZW2) and the C-terminal portion of the Cas9 protein comprises a portion of amino acids 574-1368 or 638-1368 of SpCas9 wild-type.

[0182] The C-terminal portion of the split Cas9 can be joined with the N-terminal portion of the split Cas9 to form a complete Cas9 protein. In some embodiments, the C-terminal portion of the Cas9 protein starts from where the N-terminal portion of the Cas9 protein ends. As such, in some embodiments, the C-terminal portion of the split Cas9 comprises a portion of amino acids (551-651)-1368 of spCas9. “(551-651)-1368” means starting at an amino acid between amino acids 551-651 (inclusive) and ending at amino acid 1368. For example, the C-terminal portion of the split Cas9 may comprise a portion of any one of amino acid 551-1368, 552-1368, 553-1368, 554-1368, 555-1368, 556-1368, 557-1368, 558-1368, 559-1368, 560-1368, 561-1368, 562-1368, 563-1368, 564-1368, 565-1368, 566-1368, 567-1368, 568-1368, 569-1368, 570-1368, 571-1368, 572-1368, 573-1368, 574-1368, 575-1368, 576-1368, 577-1368, 578-1368, 579-1368, 580-1368, 581-1368, 582-1368, 583-1368, 584-1368, 585-1368, 586-1368, 587-1368, 588-1368, 589-1368, 590-1368, 591-1368, 592-1368, 593-1368, 594-1368, 595-1368, 596-1368, 597-1368, 598-1368, 599-1368, 600-1368, 601-1368, 602-1368, 603-1368, 604-1368, 605-1368, 606-1368, 607-1368, 608-1368, 609-1368, 610-1368, 611-1368, 612-1368, 613-1368, 614-1368, 615-1368, 616-1368, 617-1368, 618-1368, 619-1368, 620-1368, 621-1368, 622-1368, 623-1368, 624-1368, 625-1368, 626-1368, 627-1368, 628-1368, 629-1368, 630-1368, 631-1368, 632-1368, 633-1368, 634-1368, 635-1368, 636-1368, 637-1368, 638-1368, 639-1368, 640-1368, 641-1368, 642-1368, 643-1368, 644-1368, 645-1368, 646-1368, 647-1368, 648-1368, 649-1368, 650-1368, or 651-1368 of spCas9. In some embodiments, the C-terminal portion of the split Cas9 protein comprises a portion of amino acids 574-1368 or 638-1368 of SpCas9.

[0183] By “subject” is meant a mammal, including, but not limited to, a human or non-human mammal, such as a non-human primate (monkey), bovine, equine, canine, ovine, or feline. In some embodiments, a subject described herein includes a pathogenic mutation in an SDS polynucleotide sequence encoding an SBDS protein that identifies the subject as having or having a propensity to develop SDS.

[0184] By “substantially identical” is meant a polypeptide or nucleic acid molecule exhibiting at least 50% identity to a reference amino acid sequence (for example, any one of the amino acid sequences described herein) or nucleic acid sequence (for example, any one of the nucleic acid sequences described herein). In one embodiment, such a sequence is at least 60%, 65%, 70%, 75%, 80% or 85%, 90%, 95% or even 99% identical at the amino acid level or nucleic acid level to the sequence used for comparison.

[0185] Sequence identity is typically measured using sequence analysis software (for example, Sequence Analysis Software Package of the Genetics Computer Group, University of Wisconsin Biotechnology Center, 1710 University Avenue, Madison, Wis. 53705, BLAST, BESTFIT, GAP, or PILEUP/PRETTYBOX programs). Such software matches identical or similar sequences by assigning degrees of homology to various substitutions, deletions, and/or other modifications. Conservative substitutions typically include substitutions within the following groups: glycine, alanine; valine, isoleucine, leucine; aspartic acid, glutamic acid, asparagine, glutamine; serine, threonine; lysine, arginine; and phenylalanine, tyrosine. In an exemplary approach to determining the degree of identity, a BLAST program may be used, with a probability score between e⁻³ and e⁻¹⁰⁰ indicating a closely related sequence.

COBALT is used, for example, with the following parameters:
[0186] a) alignment parameters: Gap penalties-11,-1 and End-Gap penalties-5,-1,
[0187] b) CDD Parameters: Use RPS BLAST on; Blast E-value 0.003; Find Conserved columns and Recompute on, and
[0188] c) Query Clustering Parameters: Use query clusters on; Word Size 4; Max cluster distance 0.8; Alphabet Regular.
   EMBOSS Needle is used, for example, with the following parameters:
[0189] a) Matrix: BLOSUM62;
[0190] b) GAP OPEN: 10;
[0191] c) GAP EXTEND: 0.5;
[0192] d) OUTPUT FORMAT: pair;
[0193] e) END GAP PENALTY: false;
[0194] f) END GAP OPEN: 10; and
[0195] g) END GAP EXTEND: 0.5.

[0196] The term “target site” refers to a sequence within a nucleic acid molecule that is deaminated by a deaminase or a fusion protein comprising a deaminase (e.g., a dCas9-adenosine deaminase fusion protein or a base editor disclosed herein).

[0197] Because RNA-programmable nucleases (e.g., Cas9) use RNA:DNA hybridization to target DNA cleavage sites, these proteins are able to be targeted, in principle, to any sequence specified by the guide RNA. Methods of using RNA-programmable nucleases, such as Cas9, for site-specific cleavage (e.g., to modify a genome) are known in the art (see e.g., Cong, L. et ah, Multiplex genome engineering using CRISPR/Cas systems. Science 339, 819-823 (2013); Mali, P. et ah, RNA-guided human genome engineering via Cas9. Science 339, 823-826 (2013); Hwang, W. Y. et ah, Efficient genome editing in zebrafish using a CRISPR-Cas system. Nature biotechnology 31, 227-229 (2013); Jinek, M. et ah, RNA-programmed genome editing in human cells. eLife 2, e00471 (2013); Dicarlo, J. E. et ah, Genome engineering in Saccharomyces cerevisiae using CRISPR-Cas systems. Nucleic acids research (2013); Jiang, W. et ah RNA-guided editing of bacterial genomes using CRISPR-Cas systems. Nature biotechnology 31, 233-239 (2013); the entire contents of each of which are incorporated herein by reference).

[0198] As used herein, the terms “treat,” treating,” “treatment,” and the like refer to reducing, decreasing, abating, diminishing, alleviating, or ameliorating a disease or disorder and/or symptoms associated therewith or obtaining a desired pharmacologic and/or physiologic effect. It will be appreciated that, although not precluded, treating a disorder or condition does not require that the disorder, condition or symptoms associated therewith be completely eliminated. In some embodiments, the effect is therapeutic, i.e., without limitation, the effect partially or completely reduces, diminishes, abrogates, abates, alleviates, decreases the intensity of, or cures a disease and/or adverse symptom attributable to the disease. In some embodiments, the effect is preventative, i.e., the effect protects or prevents an occurrence or reoccurrence of a disease or condition. To this end, the presently disclosed methods comprise administering a therapeutically effective amount of a compositions as described herein. In one embodiment, the invention provides for the treatment of SDS.

[0199] By “uracil glycosylase inhibitor” or “UGI” is meant an agent that inhibits the uracil-excision repair system. In one embodiment, the agent is a protein or fragment thereof that binds a host uracil-DNA glycosylase and prevents removal of uracil residues from DNA. In an embodiment, a UGI is a protein, a fragment thereof, or a domain that is capable of inhibiting a uracil-DNA glycosylase base-excision repair enzyme. In some embodiments, a UGI domain comprises a wild-type UGI or a modified version thereof. In some embodiments, a UGI domain comprises a fragment of the exemplary amino acid sequence set forth below. In some embodiments, a UGI fragment comprises an amino acid sequence that comprises at least 60%, at least 65%, at least 70%, at least 75%, at least 80%, at least 85%, at least 90%, at least 95%, at least 96%, at least 97%, at least 98%, at least 99%, or 100% of the exemplary UGI sequence provided below. In some embodiments, a UGI comprises an amino acid sequence that is homologous to the exemplary UGI amino acid sequence or fragment thereof, as set forth below. In some embodiments, the UGI, or a portion thereof, is at least 70%, at least 75%, at least 80%, at least 85%, at least 90%, at least 95%, at least 96%, at least 97%, at least 98%, at least 99%, at least 99.5%, at least 99.9%, or 100% identical to a wild type UGI or a UGI sequence, or portion thereof, as set forth below. An exemplary UGI comprises an amino acid sequence as follows:

>splP14739IUNGI_BPPB2 Uracil-DNA glycosylase
inhibitor
MTNLSDIIEKETGKQLVIQESILMLPEEVEEVIGNKPESDILVHTAYDE
STDENVMLLTSDAPEYKPWALVIQDSNGENKIKML.

[0200] Ranges provided herein are understood to be shorthand for all of the values within the range. For example, a range of 1 to 50 is understood to include any number, combination of numbers, or sub-range from the group consisting 1, 2, 3, 4, 5, 6, 7, 8, 9, 10, 11, 12, 13, 14, 15, 16, 17, 18, 19, 20, 21, 22, 23, 24, 25, 26, 27, 28, 29, 30, 31, 32, 33, 34, 35, 36, 37, 38, 39, 40, 41, 42, 43, 44, 45, 46, 47, 48, 49, or 50.

[0201] The recitation of a listing of chemical groups in any definition of a variable herein includes definitions of that variable as any single group or combination of listed groups. The recitation of an embodiment for a variable or aspect herein includes that embodiment as any single embodiment or in combination with any other embodiments or portions thereof.

[0202] Any compositions or methods provided herein can be combined with one or more of any of the other compositions and methods provided herein.

[0203] The description and examples herein illustrate embodiments of the present disclosure in detail. It is to be understood that this disclosure is not limited to the particular embodiments described herein and as such can vary. Those of skill in the art will recognize that there are numerous variations and modifications of this disclosure, which are encompassed within its scope.

[0204] All terms are intended to be understood as they would be understood by a person skilled in the art. Unless defined otherwise, all technical and scientific terms used herein have the same meaning as commonly understood by one of ordinary skill in the art to which the disclosure pertains.

[0205] The practice of some embodiments disclosed herein employ, unless otherwise indicated, conventional techniques of immunology, biochemistry, chemistry, molecular biology, microbiology, cell biology, genomics and recombinant DNA, which are within the skill of the art. See for example Sambrook and Green, Molecular Cloning: A Laboratory Manual, 4th Edition (2012); the series Current Protocols in Molecular Biology (F. M. Ausubel, et al. eds.); the series Methods In Enzymology (Academic Press, Inc.), PCR 2: A Practical Approach (M. J. MacPherson, B. D. Hames and G. R. Taylor eds. (1995)), Harlow and Lane, eds. (1988) Antibodies, A Laboratory Manual, and Culture of Animal Cells: A Manual of Basic Technique and Specialized Applications, 6th Edition (R. I. Freshney, ed. (2010)).

[0206] Although various features of the present disclosure can be described in the context of a single embodiment, the features can also be provided separately or in any suitable combination. Conversely, although the present disclosure can be described herein in the context of separate embodiments for clarity, the present disclosure can also be implemented in a single embodiment. The section headings used herein are for organizational purposes only and are not to be construed as limiting the subject matter described.

[0207] The features of the present disclosure are set forth with particularity in the appended claims. A better understanding of the features and advantages of the present will be obtained by reference to the following detailed description that sets forth illustrative embodiments, in which the principles of the disclosure are utilized, and in view of the accompanying drawings as described hereinbelow.

### BRIEF DESCRIPTION OF THE DRAWINGS

[0208] FIG. 1A and FIG. 1B show mutations in SBDS that cause SDS. FIG. 1A provides a map of SBDS (coding regions in light shading, non-coding regions in dark shading) and a sequence alignment of the exon 2 region of SBDS and an SBDS protein, with gene-specific (gray; top) and pseudogene-specific (gray; bottom) sequences indicated. Compared with SBDS, SBDSP, which results from the conversion event, exon 2 contains sequence changes that are predicted to result in protein truncation (underlined). These include an in-frame stop codon at position 184 and a T→C change at 250+10 (corresponding to the invariant T of the donor splice site at 258+2 in SBDS) that results in the use of an alternate donor splice site at 250+1 (invariant splice site positions are boxed). FIG. 1B shows sequence reads for cloned segments from the exon 2 region of SBDS indicating sequence changes in individuals with SDS that were derived from gene conversion events between SBDS and its pseudogene; three converted alleles are shown. These include 183-184TA→CT, 258+2T→C and an extended conversion mutation, 183-184TA→CT+201A→G+258+2T→C. In each case, informative flanking positions, including 141 and 258+124, were not converted (green).

[0209] FIGS. 2A-2D are schematic diagrams that illustrate strategies for restoring transcription in an SBDS gene comprising one or more pathogenic mutations. FIG. 2A illustrates a strategy for introducing a mutation that eliminates a stop codon and provides for the expression of an SBDS protein comprising an alternate amino acid (e.g., Trp (W)) at amino acid position 62 (e.g., (K62X)). FIGS. 2B and 2D illustrate a strategy for correcting the splice site at nucleotide position 258 (target SNP rs113993993 C→T). FIG. 2C illustrates the splice donor position at which the canonical splice donor is restored to correct the SNP mutation.

[0210] FIGS. 3A-3C present tables showing the amino acid positions in which substitutions occur in the Cas9 protein, e.g., modified Cas9, such as modified SpCas9, yielding Cas9 variants which have specificity for the altered PAM 5′-NGC-3′ or a PAM containing 5′-NGC-3′, and plasmid constructs encoding the SpCas9 variant sequences. Cytidine base editors (CBEs) which comprise at least one cytidine deaminase and at least one Cas9 variant as described are used with to correct mutations in the SBDS gene associated with SDS as described in Example 3. FIG. 3A presents the amino acid positions that are changed from wildtype in the Cas9 proteins to produce Cas9 variants (designated by the numbers in the left column) that were able to bind an NGC PAM. These Cas9 variants were components of the CBEs assessed in the base editing studies described herein; FIG. 3B presents a subset of the Cas9 variants that provided especially good high on-target editing with limited bystander effects in the studies. Also shown in FIG. 3B is a schematic of Cas9 protein domains and their locations in the Cas9 protein sequence. FIG. 3C illustrates the plasmid vector components encoding the SpCas9 variants, and sequence mutations therein, having specificity for the altered PAM 5′-NGC-3′ as described herein.

[0211] FIG. 4 illustrates a graph comparing the relative mutation rates of base editing achieved by CBEs comprising different cytidine deaminases as shown on the abscissa.

[0212] FIG. 5 is a table showing guide RNAs (gRNAs) that were used with the CBEs assessed in the studies described herein. In embodiments, the gRNA sequences were components of plasmid constructs used in the base editing studies described in the Examples.

[0213] FIGS. 6A-6C show graphs of percent editing (e.g., on-target editing) versus percent bystander edits achieved by NGC CBE variants and the 19mer and 20mer gRNAs, e.g., G88 and G44, as described herein. In the right-hand graph of FIG. 6A, as well as in FIG. 6B, “PV226” and “PV230” refer to the plasmids used in the studies. The PV226 plasmid contains a polynucleotide encoding the Cas9 variant #226, the sequence of which is shown in FIGS. 3A-3C; the PV230 plasmid contains a polynucleotide encoding the Cas9 variant #230, the sequence of which is shown in FIGS. 3A-3C. Percent editing exhibited by other NGC CBEs containing different Cas9 variants, whose sequences are described in FIGS. 3A-3C, and the 20mer gRNA G44 is shown in FIG. 6C.

[0214] FIGS. 7A and 7B show graphs of percent editing by the NGC CBEs comprising the cytidine deaminases and Cas9 variants shown in Table 13 used in conjunction with the 19mer gRNA (G88) and the 20mer gRNA (G44) as described in Example 4 herein.

[0215] FIGS. 8A-8J show graphs of percent base editing (on target and bystander editing) achieved by NGC CBEs comprising different cytidine deaminases and Cas9 (e.g., SpCas9) variant polypeptides having the specific combinations of mutations in the Cas9 amino acid sequence as presented in FIGS. 3A-3C or Table 13, together with either the 19mer or the 20mer gRNAs, as assessed in cell-based (HEK293) assays to correct the splice site SNP in the SBDS polynucleotide sequence. FIG. 8A shows the percent on-target versus bystander editing exhibited by NGC CBE containing the Cas9 variant 225 and PpAPOBEC1 and by the NGC CBEs 454 and 459 (Table 13) containing PpAPOBEC1 and the Cas9 variants 226 and 244 (FIGS. 3A-3C), respectively, used with the 19mer (Guide 88) gRNA. FIG. 8B shows the percent on-target versus bystander editing exhibited by NGC CBE containing the Cas9 variant 225 and PpAPOBEC1 and by the NGC CBEs 454 and 459 (Table 13) containing PpAPOBEC1 and the Cas9 variants 226 and 244, respectively, used with the 20mer (Guide 44) gRNA. FIGS. 8C and 8D show the on-target and bystander base editing percentages of an NGC CBE comprising the AmAPOBEC1 cytidine deaminase and the Cas9 variants 225, 226 and 244 (FIGS. 3A-3C) together with either the 19mer (Guide 88) or the 20mer (Guide 44) gRNA. FIGS. 8E and 8F show the on-target and bystander base editing percentages of an NGC CBE comprising the PmCDA1 cytidine deaminase and the Cas9 variants 225, 453 and 458 (Table 13) together with either the 19mer (Guide 88) or the 20mer (Guide 44) gRNA. FIGS. 8G and 8H show the on-target and bystander base editing percentages of an NGC CBE comprising the RRA3F cytidine deaminase and the Cas9 variants 225, 455 and 460 (Table 13) together with either the 19mer (Guide 88) or the 20mer (Guide 44) gRNA. FIGS. 8I and 8J show the on-target and bystander base editing percentages of an NGC CBE comprising the SsAPOBEC2 cytidine deaminase and the Cas9 variants 225, 456 and 461 (Table 13) together with either the 19mer (Guide 88) or the 20mer (Guide 44) gRNA. In FIGS. 8A-8J, Cas9 variant 225 (or PV225) is alternatively termed “Beam shuffle.

[0216] FIGS. 9A-9D show graphs and dot plots of percent editing by the NGC CBEs comprising PpAPOBEC1 cytidine deaminase polypeptide sequences containing various mutations as described in Example 4, such as an H122A mutation alone and in combination with the amino acid mutations R33A, W90F, K34A, R52A, H121A and Y120F, together with a 19mer gRNA (FIG. 9A) or a 20mer gRNA (FIG. 9B). The percentage of on target versus bystander editing was assessed in in vitro cell-based assays. FIGS. 9C and 9D present the data of FIGS. 9A and 9B, respectively, in dot blot format.

[0217] FIG. 10 presents a table depicting the mutations and combinations of mutations that were made in the SpCas9 protein to create SpCas9 variants having combinations of mutations as shown, including “NRCH” mutations as described by S. Miller et al., April, 2020, “Continuous evolution of SpCas9 variants compatible with non-G PAMs,” Nature Biotechnology, 38(4):471-481 (published online 2020 Feb. 10. doi: 10.1038/s41587-020-0412-8), the contents of which are incorporated by reference herein in their entirety. Combinations of the NRCH mutations (amino acid substitutions) were included in several different SpCas9 variants to determine those that would yield a SpCas9 variant component of the NGC CBEs for use in correcting the splice site SNP in the SBDS gene associated with SDS with high on target versus bystander base editing. (Example 6). In FIG. 10, the amino acids in darker shade reflect amino acid substitutions in the Cas9 (SpCas9) amino acid sequence compared with the sequence of a wild type, nonmutated Cas9 (SpCas9) protein. The amino acids in a lighter shade reflect the amino acid residues of the wild type, nonmutated Cas9 (SpCas9) protein.

[0218] FIGS. 11A and 11B show graphs illustrating percent editing by the NGC CBEs comprising a cytidine deaminase, (e.g., PpAPOBEC1) and SpCas9 variants including one or more NRCH mutations as set forth in FIG. 10 and Example 5, used in conjunction with either the 19mer gRNA or the 20mer gRNA, in cell-based assays to evaluate on target and bystander editing efficiencies of these CBEs to correct the splice site SNP in the SBDS gene associated with SDS. NGC CBEs 468 and 469 (FIG. 10) showed high levels of on-target versus off-target base editing when used in conjunction with either the 19mer or the 20mer gRNA.

[0219] FIGS. 12A-12C show graphs illustrating the results of in vitro cell-based assays carried out to assess base editing efficiency and on-target versus bystander editing percentages of NGC CBEs encoded by mRNA as described in Example 6, together with gRNAs of different lengths (17mer, 18mer, 19mer, 20mer, or 21mer). As observed mRNA 342 with an 18mer and 20mer gRNA had the fewest C to A or C to G transitions compared with mRNA 340 or mRNA 341.

### DETAILED DESCRIPTION OF THE INVENTION

[0220] The present invention features compositions and methods that edit a pathogenic genetic mutation that causes aberrant splicing in a gene to permit transcription and achieve a therapeutic effect using a programmable nucleobase editor. In some embodiments, the editing involves converting a stop codon to a codon that is permissive for transcription. In some embodiments, the editing involves providing and correcting a splice acceptor or splice donor site, or providing an alternate splice acceptor or splice donor site. In some embodiments, more than one mutation causing aberrant splicing is corrected.

[0221] The invention is based, at least in part, on a strategy to use adenosine or cytidine base editors (ABEs, CBEs) to edit a pathogenic mutation (e.g., a mutation resulting from gene conversion) in a gene associated with Shwachman Diamond Syndrome (SDS). Accordingly, the invention provides base editor systems comprising an ABE or CBE useful for the treatment or prevention of SDS.

### Shwachman Diamond Syndrome (SDS)

[0222] Shwachman Diamond Syndrome (SDS) is an autosomal recessive disorder. Approximately 90% of patients meeting the clinical diagnostic criteria for SDS have mutations in the Shwachman-Bodian-Diamond Syndrome (SBDS) gene. The carrier frequency for this mutation has been estimated at around 1 in 110. This highly conserved gene has five exons encompassing 7.9 kb and maps to the 7q11 centromeric region of chromosome 7. The SDBS gene encodes a novel 250-amino acid protein lacking homology to known protein functional domains. An adjacent pseudogene, SBDSP, shares 97% homology with SBDS but contains deletions and nucleotide changes that prevent the generation of a functional protein. Roughly 75% of patients with SDS have mutations resulting from a gene conversion event with this pseudogene. Gene conversion results when recombination occurs between homologous sequences that are present at different genomic loci (paralogous sequences). The presence of the SBDS pseudo (also termed SBDSP) gene likely resulted from previous gene duplications. The SBDS mRNA and protein are widely expressed throughout human tissues at both the mRNA and protein levels. Although the early truncating SBDS mutation 183 TA>CT is common among patients with SDS, patients homozygous for this mutation have not been identified, suggesting that complete loss of the SBDS expression is likely lethal in human patients.

[0223] Common sequence changes associated with SDS include a TA→CT dinucleotide change at position 183-184 or a deletion of 8 bp at the end of exon 2. Analysis of SBDS genomic sequences confirmed the presence of the 183-184TA→CT change and identified a 258+2T→C change in individuals with SDS expressing the deleted transcript. The mutation 258+2T→C is predicted to disrupt the donor splice site of intron 2, and the 8-bp deletion is consistent with use of an upstream cryptic splice donor site at position 251-252. The dinucleotide alteration 183-184TA→CT introduces an in-frame stop codon (K62X), and 258+2T→C and the resultant 8-bp deletion cause premature truncation of the encoded protein by frameshift (84Cfs3).

[0224] The invention provides compositions and methods that permit transcription of a polynucleotides having one or more alterations (e.g., gene conversions) that result in aberrant splicing, thereby providing for the expression of a functional SBDS protein (e.g., a protein having activity sufficient to ameliorate the effects of SBDS gene conversion). In particular embodiments, the invention provides for the introduction of alterations into an SBDS gene comprising a 183-184TA→CT that converts a TAA stop into TGG, which encodes Trp, and is permissive for transcription. In other embodiments, the invention introduces an alteration in a polynucleotide sequence that introduces a splice donor or effector site that permits splicing of a polynucleotide encoding a protein having biological activity. In some embodiments, the invention corrects a site in Exon 2 of an SBDS gene (e.g., by editing the cytosine at nucleotide position 1495 as shown in FIG. 2B).

### Nucleobase Editor

[0225] Disclosed herein is a base editor or a nucleobase editor for editing, modifying or altering a target nucleotide sequence of a polynucleotide. Described herein is a nucleobase editor or a base editor comprising a polynucleotide programmable nucleotide binding domain and a nucleobase editing domain (e.g., adenosine deaminase, cytidine deaminase). A polynucleotide programmable nucleotide binding domain, when in conjunction with a bound guide polynucleotide (e.g., gRNA), can specifically bind to a target polynucleotide sequence (i.e., via complementary base pairing between bases of the bound guide nucleic acid and bases of the target polynucleotide sequence) and thereby localize the base editor to the target nucleic acid sequence desired to be edited. In some embodiments, the target polynucleotide sequence comprises single-stranded DNA or double-stranded DNA. In some embodiments, the target polynucleotide sequence comprises RNA. In some embodiments, the target polynucleotide sequence comprises a DNA-RNA hybrid.

### Polynucleotide Programmable Nucleotide Binding Domain

[0226] It should be appreciated that polynucleotide programmable nucleotide binding domains can also include nucleic acid programmable proteins that bind RNA. For example, the polynucleotide programmable nucleotide binding domain can be associated with a nucleic acid that guides the polynucleotide programmable nucleotide binding domain to an RNA. Other nucleic acid programmable DNA binding proteins are also within the scope of this disclosure, though they are not specifically listed in this disclosure.

[0227] A polynucleotide programmable nucleotide binding domain of a base editor can itself comprise one or more domains. For example, a polynucleotide programmable nucleotide binding domain can comprise one or more nuclease domains. In some embodiments, the nuclease domain of a polynucleotide programmable nucleotide binding domain can comprise an endonuclease or an exonuclease. Herein the term “exonuclease” refers to a protein or polypeptide capable of digesting a nucleic acid (e.g., RNA or DNA) from free ends, and the term “endonuclease” refers to a protein or polypeptide capable of catalyzing (e.g., cleaving) internal regions in a nucleic acid (e.g., DNA or RNA). In some embodiments, an endonuclease can cleave a single strand of a double-stranded nucleic acid. In some embodiments, an endonuclease can cleave both strands of a double-stranded nucleic acid molecule. In some embodiments a polynucleotide programmable nucleotide binding domain can be a deoxyribonuclease. In some embodiments a polynucleotide programmable nucleotide binding domain can be a ribonuclease.

[0228] In some embodiments, a nuclease domain of a polynucleotide programmable nucleotide binding domain can cut zero, one, or two strands of a target polynucleotide. In some cases, the polynucleotide programmable nucleotide binding domain can comprise a nickase domain. Herein the term “nickase” refers to a polynucleotide programmable nucleotide binding domain comprising a nuclease domain that is capable of cleaving only one strand of the two strands in a duplexed nucleic acid molecule (e.g., DNA). In some embodiments, a nickase can be derived from a fully catalytically active (e.g., natural) form of a polynucleotide programmable nucleotide binding domain by introducing one or more mutations into the active polynucleotide programmable nucleotide binding domain. For example, where a polynucleotide programmable nucleotide binding domain comprises a nickase domain derived from Cas9, the Cas9-derived nickase domain can include a D10A mutation and a histidine at position 840. In such cases, the residue H840 retains catalytic activity and can thereby cleave a single strand of the nucleic acid duplex. In another example, a Cas9-derived nickase domain can comprise an H840A mutation, while the amino acid residue at position 10 remains a D. In some embodiments, a nickase can be derived from a fully catalytically active (e.g., natural) form of a polynucleotide programmable nucleotide binding domain by removing all or a portion of a nuclease domain that is not required for the nickase activity. For example, where a polynucleotide programmable nucleotide binding domain comprises a nickase domain derived from Cas9, the Cas9-derived nickase domain can comprise a deletion of all or a portion of the RuvC domain or the HNH domain.

[0229] The amino acid sequence of an exemplary catalytically active Cas9 is as follows:

MDKKYSIGLDIGTNSVGWAVITDEYKVPSKKFKVLGNTDRHSIKKNLIG
ALLFDSGETAEATRLKRTARRRYTRRKNRICYLQEIFSNEMAKVDDSFF
HRLEESFLVEEDKKHERHPIFGNIVDEVAYHEKYPTIYHLRKKLVDSTD
KADLRLIYLALAHMIKFRGHFLIEGDLNPDNSDVDKLFIQLVQTYNQLF
EENPINASGVDAKAILSARLSKSRRLENLIAQLPGEKKNGLFGNLIALS
LGLTPNFKSNFDLAEDAKLQLSKDTYDDDLDNLLAQIGDQYADLFLAAK
NLSDAILLSDILRVNTEITKAPLSASMIKRYDEHHQDLTLLKALVRQQL
PEKYKEIFFDQSKNGYAGYIDGGASQEEFYKFIKPILEKMDGTEELLVK
LNREDLLRKQRTFDNGSIPHQIHLGELHAILRRQEDFYPFLKDNREKIE
KILTFRIPYYVGPLARGNSRFAWMTRKSEETITPWNFEEVVDKGASAQS
FIERMTNFDKNLPNEKVLPKHSLLYEYFTVYNELTKVKYVTEGMRKPAF
LSGEQKKAIVDLLFKTNRKVTVKQLKEDYFKKIECFDSVEISGVEDRFN
ASLGTYHDLLKIIKDKDFLDNEENEDILEDIVLTLTLFEDREMIEERLK
TYAHLFDDKVMKQLKRRRYTGWGRLSRKLINGIRDKQSGKTILDFLKSD
GFANRNFMQLIHDDSLTFKEDIQKAQVSGQGDSLHEHIANLAGSPAIKK
GILQTVKVVDELVKVMGRHKPENIVIEMARENQTTQKGQKNSRERMKRI
EEGIKELGSQILKEHPVENTQLQNEKLYLYYLQNGRDMYVDQELDINRL
SDYDVDHIVPQSFLKDDSIDNKVLTRSDKNRGKSDNVPSEEVVKKMKNY
WRQLLNAKLITQRKFDNLTKAERGGLSELDKAGFIKRQLVETRQITKHV
AQILDSRMNTKYDENDKLIREVKVITLKSKLVSDFRKDFQFYKVREINN
YHHAHDAYLNAVVGTALIKKYPKLESEFVYGDYKVYDVRKMIAKSEQEI
GKATAKYFFYSNIMNFFKTEITLANGEIRKRPLIETNGETGEIVWMKGR
DFATVRKVLSMPQVNIVKKTEVQTGGFSKESILPKRNSDKLIARKKDWD
PKKYGGFDSPTVAYSVLVVAKVEKGKSKKLKSVKELLGITIMERSSFEK
NPIDFLEAKGYKEVKKDLIIKLPKYSLFELENGRKRMLASAGELQKGNE
LALPSKYVNFLYLASHYEKLKGSPEDNEQKQLFVEQHKHYLDEIIEQIS
EFSKRVILADANLDKVLSAYNKHRDKPIREQAENIIHLFTLTNLGAPAA
FKYFDTTIDRKRYTSTKEVLDATLIHQSITGLYETRIDLSQLGGD.

[0230] A base editor comprising a polynucleotide programmable nucleotide binding domain comprising a nickase domain is thus able to generate a single-strand DNA break (nick) at a specific polynucleotide target sequence (e.g., determined by the complementary sequence of a bound guide nucleic acid). In some embodiments, the strand of a nucleic acid duplex target polynucleotide sequence that is cleaved by a base editor comprising a nickase domain (e.g., Cas9-derived nickase domain) is the strand that is not edited by the base editor (i.e., the strand that is cleaved by the base editor is opposite to a strand comprising a base to be edited). In other embodiments, a base editor comprising a nickase domain (e.g., Cas9-derived nickase domain) can cleave the strand of a DNA molecule which is being targeted for editing. In such cases, the non-targeted strand is not cleaved.

[0231] Also provided herein are base editors comprising a polynucleotide programmable nucleotide binding domain which is catalytically dead (i.e., incapable of cleaving a target polynucleotide sequence). Herein the terms “catalytically dead” and “nuclease dead” are used interchangeably to refer to a polynucleotide programmable nucleotide binding domain which has one or more mutations and/or deletions resulting in its inability to cleave a strand of a nucleic acid. In some embodiments, a catalytically dead polynucleotide programmable nucleotide binding domain base editor can lack nuclease activity as a result of specific point mutations in one or more nuclease domains. For example, in the case of a base editor comprising a Cas9 domain, the Cas9 can comprise both a D10A mutation and an H840A mutation. Such mutations inactivate both nuclease domains, thereby resulting in the loss of nuclease activity. In other embodiments, a catalytically dead polynucleotide programmable nucleotide binding domain can comprise one or more deletions of all or a portion of a catalytic domain (e.g., RuvC1 and/or HNH domains). In further embodiments, a catalytically dead polynucleotide programmable nucleotide binding domain comprises a point mutation (e.g., D10A or H840A) as well as a deletion of all or a portion of a nuclease domain.

[0232] Also contemplated herein are mutations capable of generating a catalytically dead polynucleotide programmable nucleotide binding domain from a previously functional version of the polynucleotide programmable nucleotide binding domain. For example, in the case of catalytically dead Cas9 (“dCas9”), variants having mutations other than D10A and H840A are provided, which result in nuclease inactivated Cas9. Such mutations, by way of example, include other amino acid substitutions at D10 and H840, or other substitutions within the nuclease domains of Cas9 (e.g., substitutions in the HNH nuclease subdomain and/or the RuvC1 subdomain). Additional suitable nuclease-inactive dCas9 domains can be apparent to those of skill in the art based on this disclosure and knowledge in the field, and are within the scope of this disclosure. Such additional exemplary suitable nuclease-inactive Cas9 domains include, but are not limited to, D10A/H840A, D10A/D839A/H840A, and D10A/D839A/H840A/N863A mutant domains (See, e.g., Prashant et al., CAS9 transcriptional activators for target specificity screening and paired nickases for cooperative genome engineering. Nature Biotechnology. 2013; 31(9): 833-838, the entire contents of which are incorporated herein by reference).

[0233] Non-limiting examples of a polynucleotide programmable nucleotide binding domain which can be incorporated into a base editor include a CRISPR protein-derived domain, a restriction nuclease, a meganuclease, TAL nuclease (TALEN), and a zinc finger nuclease (ZFN). In some cases, a base editor comprises a polynucleotide programmable nucleotide binding domain comprising a natural or modified protein or portion thereof which via a bound guide nucleic acid is capable of binding to a nucleic acid sequence during CRISPR (i.e., Clustered Regularly Interspaced Short Palindromic Repeats)-mediated modification of a nucleic acid. Such a protein is referred to herein as a “CRISPR protein”. Accordingly, disclosed herein is a base editor comprising a polynucleotide programmable nucleotide binding domain comprising all or a portion of a CRISPR protein (i.e. a base editor comprising as a domain all or a portion of a CRISPR protein, also referred to as a “CRISPR protein-derived domain” of the base editor). A CRISPR protein-derived domain incorporated into a base editor can be modified compared to a wild-type or natural version of the CRISPR protein. For example, as described below a CRISPR protein-derived domain can comprise one or more mutations, insertions, deletions, rearrangements and/or recombinations relative to a wild-type or natural version of the CRISPR protein.

[0234] CRISPR is an adaptive immune system that provides protection against mobile genetic elements (viruses, transposable elements and conjugative plasmids). CRISPR clusters contain spacers, sequences complementary to antecedent mobile elements, and target invading nucleic acids. CRISPR clusters are transcribed and processed into CRISPR RNA (crRNA). In type II CRISPR systems, correct processing of pre-crRNA requires a trans-encoded small RNA (tracrRNA), endogenous ribonuclease 3 (rnc) and a Cas9 protein. The tracrRNA serves as a guide for ribonuclease 3-aided processing of pre-crRNA. Subsequently, Cas9/crRNA/tracrRNA endonucleolytically cleaves linear or circular dsDNA target complementary to the spacer. The target strand not complementary to crRNA is first cut endonucleolytically, and then trimmed 3′-5′ exonucleolytically. In nature, DNA-binding and cleavage typically requires protein and both RNAs. However, single guide RNAs (“sgRNA”, or simply “gNRA”) can be engineered so as to incorporate aspects of both the crRNA and tracrRNA into a single RNA species. See, e.g., Jinek M., Chylinski K., Fonfara I., Hauer M., Doudna J. A., Charpentier E. Science 337:816-821(2012), the entire contents of which is hereby incorporated by reference. Cas9 recognizes a short motif in the CRISPR repeat sequences (the PAM or protospacer adjacent motif) to help distinguish self versus non-self.

[0235] In some embodiments, the methods described herein can utilize an engineered Cas protein. A guide RNA (gRNA) is a short synthetic RNA composed of a scaffold sequence necessary for Cas-binding and a user-defined ˜20 nucleotide spacer that defines the genomic target to be modified. Thus, a skilled artisan can change the genomic or polynucleotide target of the Cas protein by changing the target sequence present in the gRNA. The specificity of the Cas protein is partially determined by how specific the gRNA targeting sequence is for the genomic polynucleotide target sequence compared to the rest of the genome.

[0236] In some embodiments, the gRNA scaffold sequence is as follows:

GUUUUAGAGC UAGAAAUAGC AAGUUAAAAU AAGGCUAGUC
CGUUAUCAAC UUGAAAAAGU GGCACCGAGU CGGUGCUUUU.

[0237] In an embodiment, the RNA scaffold comprises a stem loop. In an embodiment, the RNA scaffold comprises the nucleic acid sequence:

GUUUUUGUACUCUCAAGAUUUAAGUAACUGUACAACGAAACUUACACAG
UUACUUAAAUCUUGCAGAAGCUACAAAGAUAAGGCUUCAUGCCGAAAUC
AACACCCUGUCAUUUUAUGGCAGGGUG.

[0238] In an embodiment, the RNA scaffold comprises the nucleic acid sequence:

GUUUUAGAGCUAGAAAUAGCAAGUUAAAAUAAGGCUAGUCCGUUAUCAA
CUUGAAAAAGUGGCACCGAGUCGGUGCUUUU.

[0239] In an embodiment, an S. pyrogenes sgRNA scaffold polynucleotide sequence is as follows:

GUUUUAGAGCUAGAAAUAGCAAGUUAAAAUAAGGCUAGUCCGUUAUCAA
CUUGAAAAAGUGGCACCGAGUCGGUGC.

[0240] In an embodiment, an S. aureus sgRNA scaffold polynucleotide sequence is as follows:

GUUUUAGUACUCUGUAAUGAAAAUUACAGAAUCUACUAAAACAAGGCAA
AAUGCCGUGUUUAUCUCGUCAACUUGUUGGCGAGA.

[0241] In an embodiment, a BhCas12b sgRNA scaffold has the following polynucleotide sequence:

GUUCUGTCUUUUGGUCAGGACAACCGUCUAGCUAUAAGUGCUGCAGGGUG
UGAGAAACUCCUAUUGCUGGACGAUGUCUCUUACGAGGCAUUAGCAC.

[0242] In an embodiment, a BvCas12b sgRNA scaffold has the following polynucleotide sequence:

GACCUAUAGGGUCAAUGAAUCUGUGCGUGUGCCAUAAGUAAUUAAAAAUU
ACCCACCACAGGAGCACCUGAAAACAGGUGCUUGGCAC.

[0243] In some embodiments, a CRISPR protein-derived domain incorporated into a base editor is an endonuclease (e.g., deoxyribonuclease or ribonuclease) capable of binding a target polynucleotide when in conjunction with a bound guide nucleic acid. In some embodiments, a CRISPR protein-derived domain incorporated into a base editor is a nickase capable of binding a target polynucleotide when in conjunction with a bound guide nucleic acid. In some embodiments, a CRISPR protein-derived domain incorporated into a base editor is a catalytically dead domain capable of binding a target polynucleotide when in conjunction with a bound guide nucleic acid. In some embodiments, a target polynucleotide bound by a CRISPR protein derived domain of a base editor is DNA. In some embodiments, a target polynucleotide bound by a CRISPR protein-derived domain of a base editor is RNA.

[0244] Cas proteins that can be used herein include class 1 and class 2 Cas proteins. Non-limiting examples of Cas proteins include Cas1, Cas1B, Cas2, Cas3, Cas4, Cas5, Cas5d, Cas5t, Cas5h, Cas5a, Cash, Cas7, Cas8, Cas9 (also known as Csn1 or Csx12), Cas10, Csy1, Csy2, Csy3, Csy4, Cse1, Cse2, Cse3, Cse4, Cse5e, Csc1, Csc2, Csa5, Csn1, Csn2, Csm1, Csm2, Csm3, Csm4, Csm5, Csm6, Cmr1, Cmr3, Cmr4, Cmr5, Cmr6, Csb1, Csb2, Csb3, Csx17, Csx14, Csx10, Csx16, CsaX, Csx3, Csx1, Csx1S, Csf1, Csf2, CsO, Csf4, Csd1, Csd2, Cst1, Cst2, Csh1, Csh2, Csa1, Csa2, Csa3, Csa4, Csa5, Cas12a/Cpf1, Cas12b/C2c1, Cas12c/C2c3, Cas12d/CasY, Cas12e/CasX, Cas12g, Cas12h, and Cas12i, CARF, DinG, homologues thereof, or modified versions thereof. An unmodified CRISPR enzyme can have DNA cleavage activity, such as Cas9, which has two functional endonuclease domains: RuvC and HNH. A CRISPR enzyme can direct cleavage of one or both strands of a target sequence, such as within a target sequence and/or within a complement of a target sequence. For example, a CRISPR enzyme can direct cleavage of one or both strands within about 1, 2, 3, 4, 5, 6, 7, 8, 9, 10, 15, 20, 25, 50, 100, 200, 500, or more base pairs from the first or last nucleotide of a target sequence.

[0245] A vector that encodes a CRISPR enzyme that is mutated with respect to a corresponding wild-type enzyme, such that the mutated CRISPR enzyme lacks the ability to cleave one or both strands of a target polynucleotide containing a target sequence, can be used. Cas9 can refer to a polypeptide with at least or at least about 50%, 60%, 70%, 80%, 90%, 91%, 92%, 93%, 94%, 95%, 96%, 97%, 98%, 99%, or 100% sequence identity and/or sequence homology to a wild type exemplary Cas9 polypeptide (e.g., Cas9 from S. pyogenes). Cas9 can refer to a polypeptide with at most or at most about 50%, 60%, 70%, 80%, 90%, 91%, 92%, 93%, 94%, 95%, 96%, 97%, 98%, 99%, or 100% sequence identity and/or sequence homology to a wild type exemplary Cas9 polypeptide (e.g., from S. pyogenes). Cas9 can refer to the wild type or a modified form of the Cas9 protein that can comprise an amino acid change such as a deletion, insertion, substitution, variant, mutation, fusion, chimera, or any combination thereof.

[0246] In some embodiments, a CRISPR protein-derived domain of a base editor can include all or a portion of Cas9 from Corynebacterium ulcerans (NCBI Refs: NC_015683.1, NC_017317.1); Corynebacterium diphtheria (NCBI Refs: NC_016782.1, NC_016786.1); Spiroplasma syrphidicola (NCBI Ref: NC_021284.1); Prevotella intermedia (NCBI Ref: NC_017861.1); Spiroplasma taiwanense (NCBI Ref: NC_021846.1); Streptococcus iniae (NCBI Ref: NC_021314.1); Belliella baltica (NCBI Ref: NC_018010.1); Psychrojlexus torquis (NCBI Ref: NC_018721.1); Streptococcus thermophilus (NCBI Ref: YP_820832.1); Listeria innocua (NCBI Ref: NP472073.1); Campylobacter jejuni (NCBI Ref: YP 002344900.1); Neisseria meningitidis (NCBI Ref: YP 002342100.1), Streptococcus pyogenes, or Staphylococcus aureus.

### Cas9 Domains of Nucleobase Editors

[0247] Cas9 nuclease sequences and structures are well known to those of skill in the art (See, e.g., “Complete genome sequence of an M1 strain of Streptococcus pyogenes.” Ferretti et al., J. J., McShan W. M., Ajdic D. J., Savic D. J., Savic G., Lyon K., Primeaux C, Sezate S., Suvorov A. N., Kenton S., Lai H. S., Lin S. P., Qian Y., Jia H. G., Najar F. Z., Ren Q., Zhu H., Song L., White J., Yuan X., Clifton S M., Roe B. A., McLaughlin R. E., Proc. Natl. Acad. Sci. USA. 98:4658-4663(2001); “CRISPR RNA maturation by trans-encoded small RNA and host factor RNase III.” Deltcheva E., Chylinski K., Sharma C. M., Gonzales K., Chao Y., Pirzada Z. A., Eckert M. R., Vogel J., Charpentier E., Nature 471:602-607(2011); and “A programmable dual-RNA-guided DNA endonuclease in adaptive bacterial immunity.” Jinek M., Chylinski K., Fonfara I., Hauer M., Doudna J. A., Charpentier E. Science 337:816-821(2012), the entire contents of each of which are incorporated herein by reference). Cas9 orthologs have been described in various species, including, but not limited to, S. pyogenes and S. thermophilus. Additional suitable Cas9 nucleases and sequences will be apparent to those of skill in the art based on this disclosure, and such Cas9 nucleases and sequences include Cas9 sequences from the organisms and loci disclosed in Chylinski, Rhun, and Charpentier, “The tracrRNA and Cas9 families of type II CRISPR-Cas immunity systems” (2013) RNA Biology 10:5, 726-737; the entire contents of which are incorporated herein by reference.

[0248] In some aspects, a nucleic acid programmable DNA binding protein (napDNAbp) is a Cas9 domain. Non-limiting, exemplary Cas9 domains are provided herein. The Cas9 domain may be a nuclease active Cas9 domain, a nuclease inactive Cas9 domain, or a Cas9 nickase. In some embodiments, the Cas9 domain is a nuclease active domain. For example, the Cas9 domain may be a Cas9 domain that cuts both strands of a duplexed nucleic acid (e.g., both strands of a duplexed DNA molecule). In some embodiments, the Cas9 domain comprises any one of the amino acid sequences as set forth herein. In some embodiments the Cas9 domain comprises an amino acid sequence that is at least 60%, at least 65%, at least 70%, at least 75%, at least 80%, at least 85%, at least 90%, at least 95%, at least 96%, at least 97%, at least 98%, at least 99%, or at least 99.5% identical to any one of the amino acid sequences set forth herein. In some embodiments, the Cas9 domain comprises an amino acid sequence that has 1, 2, 3, 4, 5, 6, 7, 8, 9, 10, 11, 12, 13, 14, 15, 16, 17, 18, 19, 20, 21, 22, 23, 24, 25, 26, 27, 28, 29, 30, 31, 32, 33, 34, 35, 36, 37, 38, 39, 40, 41, 42, 43, 44, 45, 46, 47, 48, 49, 50 or more mutations compared to any one of the amino acid sequences set forth herein. In some embodiments, the Cas9 domain comprises an amino acid sequence that has at least 10, at least 15, at least 20, at least 30, at least 40, at least 50, at least 60, at least 70, at least 80, at least 90, at least 100, at least 150, at least 200, at least 250, at least 300, at least 350, at least 400, at least 500, at least 600, at least 700, at least 800, at least 900, at least 1000, at least 1100, or at least 1200 identical contiguous amino acid residues as compared to any one of the amino acid sequences set forth herein.

[0249] In some embodiments, proteins comprising fragments of Cas9 are provided. For example, in some embodiments, a protein comprises one of two Cas9 domains: (1) the gRNA binding domain of Cas9; or (2) the DNA cleavage domain of Cas9. In some embodiments, proteins comprising Cas9 or fragments thereof are referred to as “Cas9 variants.” A Cas9 variant shares homology to Cas9, or a fragment thereof. For example, a Cas9 variant is at least about 70% identical, at least about 80% identical, at least about 90% identical, at least about 95% identical, at least about 96% identical, at least about 97% identical, at least about 98% identical, at least about 99% identical, at least about 99.5% identical, or at least about 99.9% identical to wild type Cas9. In some embodiments, the Cas9 variant may have 1, 2, 3, 4, 5, 6, 7, 8, 9, 10, 11, 12, 13, 14, 15, 16, 17, 18, 19, 20, 21, 22, 23, 24, 25, 26, 27, 28, 29, 30, 31, 32, 33, 34, 35, 36, 37, 38, 39, 40, 41, 42, 43, 44, 45, 46, 47, 48, 49, 50 or more amino acid changes compared to wild type Cas9. In some embodiments, the Cas9 variant comprises a fragment of Cas9 (e.g., a gRNA binding domain or a DNA-cleavage domain), such that the fragment is at least about 70% identical, at least about 80% identical, at least about 90% identical, at least about 95% identical, at least about 96% identical, at least about 97% identical, at least about 98% identical, at least about 99% identical, at least about 99.5% identical, or at least about 99.9% identical to the corresponding fragment of wild type Cas9. In some embodiments, the fragment is at least 30%, at least 35%, at least 40%, at least 45%, at least 50%, at least 55%, at least 60%, at least 65%, at least 70%, at least 75%, at least 80%, at least 85%, at least 90%, at least 95% identical, at least 96%, at least 97%, at least 98%, at least 99%, or at least 99.5% of the amino acid length of a corresponding wild type Cas9. In some embodiments, the fragment is at least 100 amino acids in length. In some embodiments, the fragment is at least 100, 150, 200, 250, 300, 350, 400, 450, 500, 550, 600, 650, 700, 750, 800, 850, 900, 950, 1000, 1050, 1100, 1150, 1200, 1250, or at least 1300 amino acids in length.

[0250] In some embodiments, Cas9 fusion proteins as provided herein comprise the full-length amino acid sequence of a Cas9 protein, e.g., one of the Cas9 sequences provided herein. In other embodiments, however, fusion proteins as provided herein do not comprise a full-length Cas9 sequence, but comprise only one or more fragments thereof. Exemplary amino acid sequences of suitable Cas9 domains and Cas9 fragments are provided herein, and additional suitable sequences of Cas9 domains and fragments will be apparent to those of skill in the art.

[0251] A Cas9 protein can associate with a guide RNA that guides the Cas9 protein to a specific DNA sequence that has complementary to the guide RNA. In some embodiments, the polynucleotide programmable nucleotide binding domain is a Cas9 domain, for example a nuclease active Cas9, a Cas9 nickase (nCas9), or a nuclease inactive Cas9 (dCas9). Examples of nucleic acid programmable DNA binding proteins include, without limitation, Cas9 (e.g., dCas9 and nCas9), CasX, CasY, Cpf1, Cas12b/C2C1, and Cas12c/C2C3.

[0252] In some embodiments, wild type Cas9 corresponds to Cas9 from Streptococcus pyogenes (NCBI Reference Sequence: NC_017053.1, nucleotide and amino acid sequences as follows).

ATGGATAAGAAATACTCAATAGGCTTAGATATCGGCACAAATAGCGTCGGATGGGCGGTGAT
CACTGATGATTATAAGGTTCCGTCTAAAAAGTTCAAGGTTCTGGGAAATACAGACCGCCACA
GTATCAAAAAAAATCTTATAGGGGCTCTTTTATTTGGCAGTGGAGAGACAGCGGAAGCGACT
CGTCTCAAACGGACAGCTCGTAGAAGGTATACACGTCGGAAGAATCGTATTTGTTATCTACA
GGAGATTTTTTCAAATGAGATGGCGAAAGTAGATGATAGTTTCTTTCATCGACTTGAAGAGT
CTTTTTTGGTGGAAGAAGACAAGAAGCATGAACGTCATCCTATTTTTGGAAATATAGTAGAT
GAAGTTGCTTATCATGAGAAATATCCAACTATCTATCATCTGCGAAAAAAATTGGCAGATTC
TACTGATAAAGCGGATTTGCGCTTAATCTATTTGGCCTTAGCGCATATGATTAAGTTTCGTG
GTCATTTTTTGATTGAGGGAGATTTAAATCCTGATAATAGTGATGTGGACAAACTATTTATC
CAGTTGGTACAAATCTACAATCAATTATTTGAAGAAAACCCTATTAACGCAAGTAGAGTAGA
TGCTAAAGCGATTCTTTCTGCACGATTGAGTAAATCAAGACGATTAGAAAATCTCATTGCTC
AGCTCCCCGGTGAGAAGAGAAATGGCTTGTTTGGGAATCTCATTGCTTTGTCATTGGGATTG
ACCCCTAATTTTAAATCAAATTTTGATTTGGCAGAAGATGCTAAATTACAGCTTTCAAAAGA
TACTTACGATGATGATTTAGATAATTTATTGGCGCAAATTGGAGATCAATATGCTGATTTGT
TTTTGGCAGCTAAGAATTTATCAGATGCTATTTTACTTTCAGATATCCTAAGAGTAAATAGT
GAAATAACTAAGGCTCCCCTATCAGCTTCAATGATTAAGCGCTACGATGAACATCATCAAGA
CTTGACTCTTTTAAAAGCTTTAGTTCGACAACAACTTCCAGAAAAGTATAAAGAAATCTTTT
TTGATCAATCAAAAAACGGATATGCAGGTTATATTGATGGGGGAGCTAGCCAAGAAGAATTT
TATAAATTTATCAAACCAATTTTAGAAAAAATGGATGGTACTGAGGAATTATTGGTGAAACT
AAATCGTGAAGATTTGCTGCGCAAGCAACGGACCTTTGACAACGGCTCTATTCCCCATCAAA
TTCACTTGGGTGAGCTGCATGCTATTTTGAGAAGACAAGAAGACTTTTATCCATTTTTAAAA
GACAATCGTGAGAAGATTGAAAAAATCTTGACTTTTCGAATTCCTTATTATGTTGGTCCATT
GGCGCGTGGCAATAGTCGTTTTGCATGGATGACTCGGAAGTCTGAAGAAACAATTACCCCAT
GGAATTTTGAAGAAGTTGTCGATAAAGGTGCTTCAGCTCAATCATTTATTGAACGCATGACA
AACTTTGATAAAAATCTTCCAAATGAAAAAGTACTACCAAAACATAGTTTGCTTTATGAGTA
TTTTACGGTTTATAACGAATTGACAAAGGTCAAATATGTTACTGAGGGAATGCGAAAACCAG
CATTTCTTTCAGGTGAACAGAAGAAAGCCATTGTTGATTTACTCTTCAAAACAAATCGAAAA
GTAACCGTTAAGCAATTAAAAGAAGATTATTTCAAAAAAATAGAATGTTTTGATAGTGTTGA
AATTTCAGGAGTTGAAGATAGATTTAATGCTTCATTAGGCGCCTACCATGATTTGCTAAAAA
TTATTAAAGATAAAGATTTTTTGGATAATGAAGAAAATGAAGATATCTTAGAGGATATTGTT
TTAACATTGACCTTATTTGAAGATAGGGGGATGATTGAGGAAAGACTTAAAACATATGCTCA
CCTCTTTGATGATAAGGTGATGAAACAGCTTAAACGTCGCCGTTATACTGGTTGGGGACGTT
TGTCTCGAAAATTGATTAATGGTATTAGGGATAAGCAATCTGGCAAAACAATATTAGATTTT
TTGAAATCAGATGGTTTTGCCAATCGCAATTTTATGCAGCTGATCCATGATGATAGTTTGAC
ATTTAAAGAAGATATTCAAAAAGCACAGGTGTCTGGACAAGGCCATAGTTTACATGAACAGA
TTGCTAACTTAGCTGGCAGTCCTGCTATTAAAAAAGGTATTTTACAGACTGTAAAAATTGTT
GATGAACTGGTCAAAGTAATGGGGCATAAGCCAGAAAATATCGTTATTGAAATGGCACGTGA
AAATCAGACAACTCAAAAGGGCCAGAAAAATTCGCGAGAGCGTATGAAACGAATCGAAGAAG
GTATCAAAGAATTAGGAAGTCAGATTCTTAAAGAGCATCCTGTTGAAAATACTCAATTGCAA
AATGAAAAGCTCTATCTCTATTATCTACAAAATGGAAGAGACATGTATGTGGACCAAGAATT
AGATATTAATCGTTTAAGTGATTATGATGTCGATCACATTGTTCCACAAAGTTTCATTAAAG
ACGATTCAATAGACAATAAGGTACTAACGCGTTCTGATAAAAATCGTGGTAAATCGGATAAC
GTTCCAAGTGAAGAAGTAGTCAAAAAGATGAAAAACTATTGGAGACAACTTCTAAACGCCAA
GTTAATCACTCAACGTAAGTTTGATAATTTAACGAAAGCTGAACGTGGAGGTTTGAGTGAAC
TTGATAAAGCTGGTTTTATCAAACGCCAATTGGTTGAAACTCGCCAAATCACTAAGCATGTG
GCACAAATTTTGGATAGTCGCATGAATACTAAATACGATGAAAATGATAAACTTATTCGAGA
GGTTAAAGTGATTACCTTAAAATCTAAATTAGTTTCTGACTTCCGAAAAGATTTCCAATTCT
ATAAAGTACGTGAGATTAACAATTACCATCATGCCCATGATGCGTATCTAAATGCCGTCGTT
GGAACTGCTTTGATTAAGAAATATCCAAAACTTGAATCGGAGTTTGTCTATGGTGATTATAA
AGTTTATGATGTTCGTAAAATGATTGCTAAGTCTGAGCAAGAAATAGGCAAAGCAACCGCAA
AATATTTCTTTTACTCTAATATCATGAACTTCTTCAAAACAGAAATTACACTTGCAAATGGA
GAGATTCGCAAACGCCCTCTAATCGAAACTAATGGGGAAACTGGAGAAATTGTCTGGGATAA
AGGGCGAGATTTTGCCACAGTGCGCAAAGTATTGTCCATGCCCCAAGTCAATATTGTCAAGA
AAACAGAAGTACAGACAGGCGGATTCTCCAAGGAGTCAATTTTACCAAAAAGAAATTCGGAC
AAGCTTATTGCTCGTAAAAAAGACTGGGATCCAAAAAAATATGGTGGTTTTGATAGTCCAAC
GGTAGCTTATTCAGTCCTAGTGGTTGCTAAGGTGGAAAAAGGGAAATCGAAGAAGTTAAAAT
CCGTTAAAGAGTTACTAGGGATCACAATTATGGAAAGAAGTTCCTTTGAAAAAAATCCGATT
GACTTTTTAGAAGCTAAAGGATATAAGGAAGTTAAAAAAGACTTAATCATTAAACTACCTAA
ATATAGTCTTTTTGAGTTAGAAAACGGTCGTAAACGGATGCTGGCTAGTGCCGGAGAATTAC
AAAAAGGAAATGAGCTGGCTCTGCCAAGCAAATATGTGAATTTTTTATATTTAGCTAGTCAT
TATGAAAAGTTGAAGGGTAGTCCAGAAGATAACGAACAAAAACAATTGTTTGTGGAGCAGCA
TAAGCATTATTTAGATGAGATTATTGAGCAAATCAGTGAATTTTCTAAGCGTGTTATTTTAG
CAGATGCCAATTTAGATAAAGTTCTTAGTGCATATAACAAACATAGAGACAAACCAATACGT
GAACAAGCAGAAAATATTATTCATTTATTTACGTTGACGAATCTTGGAGCTCCCGCTGCTTT
TAAATATTTTGATACAACAATTGATCGTAAACGATATACGTCTACAAAAGAAGTTTTAGATG
CCACTCTTATCCATCAATCCATCACTGGTCTTTATGAAACACGCATTGATTTGAGTCAGCTA
GGAGGTGACTGA
MDKKYSIGLDIGTNSVGWAVITDDYKVPSKKFKVLGNTDRHSIKKNLIGALLFGSGETAEAT
RLKRTARRRYTRRKNRICYLQEIFSNEMAKVDDSFFHRLEESFLVEEDKKHERHPIFGNIVD
EVAYHEKYPTIYHLRKKLADSTDKADLRLIYLALAHMIKFRGHFLIEGDLNPDNSDVDKLFI
QLVQIYNQLFEENPINASRVDAKAILSARLSKSRRLENLIAQLPGEKRNGLFGNLIALSLGL
TPNFKSNFDLAEDAKLQLSKDTYDDDLDNLLAQIGDQYADLFLAAKNLSDAILLSDILRVNS
EITKAPLSASMIKRYDEHHQDLTLLKALVRQQLPEKYKEIFFDQSKNGYAGYIDGGASQEEF
YKFIKPILEKMDGTEELLVKLNREDLLRKQRTFDNGSIPHQIHLGELHAILRRQEDFYPFLK
DNREKIEKILTFRIPYYVGPLARGNSRFAWMTRKSEETITPWNFEEVVDKGASAQSFIERMT
NFDKNLPNEKVLPKHSLLYEYFTVYNELTKVKYVTEGMRKPAFLSGEQKKAIVDLLFKTNRK
VTVKQLKEDYFKKIECFDSVEISGVEDRFNASLGAYHDLLKIIKDKDFLDNEENEDILEDIV
LTLTLFEDRGMIEERLKTYAHLFDDKVMKQLKRRRYTGWGRLSRKLINGIRDKQAGKTILDF
LKSDGFANRNFMQLIHDDSLTFKEDIQKAQVSGQGHSLHEQIANLAGSPAIKKGILQTVKIV
DELVKVMGHKPENIVIEMARENQTTQKGQKNSRERMKRIEEGIKELGSQILKEHPVENTQLQ
NEKLYLYYLQNGRDMYVDQELDINRLSDYDVDHIVPQSFIKDDSIDNKVLTRSDKNRGKSDN
VPSEEVVKKMKNYWRQLLNAKLITQRKFDNLTKAERGGLSELDKAGFIKRQLVETRQITKHV
AQILDSRMNTKYDENDKLIREVKVITLKSKLVSDFRKDFQFYKVREINNYHHAHDAYLNAVV
GTALIKKYPKLESEFVYGDYKVYDVRKMIAKSEQEIGKATAKYFFYSNIMNFFKTEITLANG
EIRKRPLIETNGETGEIVWDKGRDFATVRKVLSMPQVNIVKKTEVQTGGFSKESILPKRNSD
KLIARKKDWDPKKYGGFDSPTVAYSVLVVAKVEKGKSKKLKSVKELLGITIMERSSFEKNPI
DFLEAKGYKEVKKDLIIKLPKYSLFELENGRKRMLASAGELQKGNELALPSKYVNFLYLASH
YEKLKGSPEDNEQKQLFVEQHKHYLDEIIEQISEFSKRVILADANLDKVLSAYNKHRDKPIR
EQAENIIHLFTLTNLGAPAAFKYFDTTIDRKRYTSTKEVLDATLIHQSITGLYETRIDLSQL
GGD

(single underline: HNH domain; double underline: RuvC domain)

[0253] In some embodiments, wild type Cas9 corresponds to, or comprises the following nucleotide and/or amino acid sequences:

ATGGATAAAAAGTATTCTATTGGTTTAGACATCGGCACTAATTCCGTTGGATGGGCTGTCAT
AACCGATGAATACAAAGTACCTTCAAAGAAATTTAAGGTGTTGGGGAACACAGACCGTCATT
CGATTAAAAAGAATCTTATCGGTGCCCTCCTATTCGATAGTGGCGAAACGGCAGAGGCGACT
CGCCTGAAACGAACCGCTCGGAGAAGGTATACACGTCGCAAGAACCGAATATGTTACTTACA
AGAAATTTTTAGCAATGAGATGGCCAAAGTTGACGATTCTTTCTTTCACCGTTTGGAAGAGT
CCTTCCTTGTCGAAGAGGACAAGAAACATGAACGGCACCCCATCTTTGGAAACATAGTAGAT
GAGGTGGCATATCATGAAAAGTACCCAACGATTTATCACCTCAGAAAAAAGCTAGTTGACTC
AACTGATAAAGCGGACCTGAGGTTAATCTACTTGGCTCTTGCCCATATGATAAAGTTCCGTG
GGCACTTTCTCATTGAGGGTGATCTAAATCCGGACAACTCGGATGTCGACAAACTGTTCATC
CAGTTAGTACAAACCTATAATCAGTTGTTTGAAGAGAACCCTATAAATGCAAGTGGCGTGGA
TGCGAAGGCTATTCTTAGCGCCCGCCTCTCTAAATCCCGACGGCTAGAAAACCTGATCGCAC
AATTACCCGGAGAGAAGAAAAATGGGTTGTTCGGTAACCTTATAGCGCTCTCACTAGGCCTG
ACACCAAATTTTAAGTCGAACTTCGACTTAGCTGAAGATGCCAAATTGCAGCTTAGTAAGGA
CACGTACGATGACGATCTCGACAATCTACTGGCACAAATTGGAGATCAGTATGCGGACTTAT
TTTTGGCTGCCAAAAACCTTAGCGATGCAATCCTCCTATCTGACATACTGAGAGTTAATACT
GAGATTACCAAGGCGCCGTTATCCGCTTCAATGATCAAAAGGTACGATGAACATCACCAAGA
CTTGACACTTCTCAAGGCCCTAGTCCGTCAGCAACTGCCTGAGAAATATAAGGAAATATTCT
TTGATCAGTCGAAAAACGGGTACGCAGGTTATATTGACGGCGGAGCGAGTCAAGAGGAATTC
TACAAGTTTATCAAACCCATATTAGAGAAGATGGATGGGACGGAAGAGTTGCTTGTAAAACT
CAATCGCGAAGATCTACTGCGAAAGCAGCGGACTTTCGACAACGGTAGCATTCCACATCAAA
TCCACTTAGGCGAATTGCATGCTATACTTAGAAGGCAGGAGGATTTTTATCCGTTCCTCAAA
GACAATCGTGAAAAGATTGAGAAAATCCTAACCTTTCGCATACCTTACTATGTGGGACCCCT
GGCCCGAGGGAACTCTCGGTTCGCATGGATGACAAGAAAGTCCGAAGAAACGATTACTCCAT
GGAATTTTGAGGAAGTTGTCGATAAAGGTGCGTCAGCTCAATCGTTCATCGAGAGGATGACC
AACTTTGACAAGAATTTACCGAACGAAAAAGTATTGCCTAAGCACAGTTTACTTTACGAGTA
TTTCACAGTGTACAATGAACTCACGAAAGTTAAGTATGTCACTGAGGGCATGCGTAAACCCG
CCTTTCTAAGCGGAGAACAGAAGAAAGCAATAGTAGATCTGTTATTCAAGACCAACCGCAAA
GTGACAGTTAAGCAATTGAAAGAGGACTACTTTAAGAAAATTGAATGCTTCGATTCTGTCGA
GATCTCCGGGGTAGAAGATCGATTTAATGCGTCACTTGGTACGTATCATGACCTCCTAAAGA
TAATTAAAGATAAGGACTTCCTGGATAACGAAGAGAATGAAGATATCTTAGAAGATATAGTG
TTGACTCTTACCCTCTTTGAAGATCGGGAAATGATTGAGGAAAGACTAAAAACATACGCTCA
CCTGTTCGACGATAAGGTTATGAAACAGTTAAAGAGGCGTCGCTATACGGGCTGGGGACGAT
TGTCGCGGAAACTTATCAACGGGATAAGAGACAAGCAAAGTGGTAAAACTATTCTCGATTTT
CTAAAGAGCGACGGCTTCGCCAATAGGAACTTTATGCAGCTGATCCATGATGACTCTTTAAC
CTTCAAAGAGGATATACAAAAGGCACAGGTTTCCGGACAAGGGGACTCATTGCACGAACATA
TTGCGAATCTTGCTGGTTCGCCAGCCATCAAAAAGGGCATACTCCAGACAGTCAAAGTAGTG
GATGAGCTAGTTAAGGTCATGGGACGTCACAAACCGGAAAACATTGTAATCGAGATGGCACG
CGAAAATCAAACGACTCAGAAGGGGCAAAAAAACAGTCGAGAGCGGATGAAGAGAATAGAAG
AGGGTATTAAAGAACTGGGCAGCCAGATCTTAAAGGAGCATCCTGTGGAAAATACCCAATTG
CAGAACGAGAAACTTTACCTCTATTACCTACAAAATGGAAGGGACATGTATGTTGATCAGGA
ACTGGACATAAACCGTTTATCTGATTACGACGTCGATCACATTGTACCCCAATCCTTTTTGA
AGGACGATTCAATCGACAATAAAGTGCTTACACGCTCGGATAAGAACCGAGGGAAAAGTGAC
AATGTTCCAAGCGAGGAAGTCGTAAAGAAAATGAAGAACTATTGGCGGCAGCTCCTAAATGC
GAAACTGATAACGCAAAGAAAGTTCGATAACTTAACTAAAGCTGAGAGGGGTGGCTTGTCTG
AACTTGACAAGGCCGGATTTATTAAACGTCAGCTCGTGGAAACCCGCCAAATCACAAAGCAT
GTTGCACAGATACTAGATTCCCGAATGAATACGAAATACGACGAGAACGATAAGCTGATTCG
GGAAGTCAAAGTAATCACTTTAAAGTCAAAATTGGTGTCGGACTTCAGAAAGGATTTTCAAT
TCTATAAAGTTAGGGAGATAAATAACTACCACCATGCGCACGACGCTTATCTTAATGCCGTC
GTAGGGACCGCACTCATTAAGAAATACCCGAAGCTAGAAAGTGAGTTTGTGTATGGTGATTA
CAAAGTTTATGACGTCCGTAAGATGATCGCGAAAAGCGAACAGGAGATAGGCAAGGCTACAG
CCAAATACTTCTTTTATTCTAACATTATGAATTTCTTTAAGACGGAAATCACTCTGGCAAAC
GGAGAGATACGCAAACGACCTTTAATTGAAACCAATGGGGAGACAGGTGAAATCGTATGGGA
TAAGGGCCGGGACTTCGCGACGGTGAGAAAAGTTTTGTCCATGCCCCAAGTCAACATAGTAA
AGAAAACTGAGGTGCAGACCGGAGGGTTTTCAAAGGAATCGATTCTTCCAAAAAGGAATAGT
GATAAGCTCATCGCTCGTAAAAAGGACTGGGACCCGAAAAAGTACGGTGGCTTCGATAGCCC
TACAGTTGCCTATTCTGTCCTAGTAGTGGCAAAAGTTGAGAAGGGAAAATCCAAGAAACTGA
AGTCAGTCAAAGAATTATTGGGGATAACGATTATGGAGCGCTCGTCTTTTGAAAAGAACCCC
ATCGACTTCCTTGAGGCGAAAGGTTACAAGGAAGTAAAAAAGGATCTCATAATTAAACTACC
AAAGTATAGTCTGTTTGAGTTAGAAAATGGCCGAAAACGGATGTTGGCTAGCGCCGGAGAGC
TTCAAAAGGGGAACGAACTCGCACTACCGTCTAAATACGTGAATTTCCTGTATTTAGCGTCC
CATTACGAGAAGTTGAAAGGTTCACCTGAAGATAACGAACAGAAGCAACTTTTTGTTGAGCA
GCACAAACATTATCTCGACGAAATCATAGAGCAAATTTCGGAATTCAGTAAGAGAGTCATCC
TAGCTGATGCCAATCTGGACAAAGTATTAAGCGCATACAACAAGCACAGGGATAAACCCATA
CGTGAGCAGGCGGAAAATATTATCCATTTGTTTACTCTTACCAACCTCGGCGCTCCAGCCGC
ATTCAAGTATTTTGACACAACGATAGATCGCAAACGATACACTTCTACCAAGGAGGTGCTAG
ACGCGACACTGATTCACCAATCCATCACGGGATTATATGAAACTCGGATAGATTTGTCACAG
CTTGGGGGTGACGGATCCCCCAAGAAGAAGAGGAAAGTCTCGAGCGACTACAAAGACCATGA
CGGTGATTATAAAGATCATGACATCGATTACAAGGATGACGATGACAAGGCTGCAGGA
MDKKYSIGLAIGTNSVGWAVITDEYKVPSKKFKVLGNTDRHSIKKNLIGALLFDSGETAEAT
RLKRTARRRYTRRKNRICYLQEIFSNEMAKVDDSFFHRLEESFLVEEDKKHERHPIFGNIVD
EVAYHEKYPTIYHLRKKLVDSTDKADLRLIYLALAHMIKFRGHFLIEGDLNPDNSDVDKLFI
QLVQTYNQLFEENPINASGVDAKAILSARLSKSRRLENLIAQLPGEKKNGLFGNLIALSLGL
TPNFKSNFDLAEDAKLQLSKDTYDDDLDNLLAQIGDQYADLFLAAKNLSDAILLSDILRVNT
EITKAPLSASMIKRYDEHHQDLTLLKALVRQQLPEKYKEIFFDQSKNGYAGYIDGGASQEEF
YKFIKPILEKMDGTEELLVKLNREDLLRKQRTFDNGSIPHQIHLGELHAILRRQEDFYPFLK
DNREKIEKILTFRIPYYVGPLARGNSRFAWMTRKSEETITPWNFEEVVDKGASAQSFIERMT
NFDKNLPNEKVLPKHSLLYEYFTVYNELTKVKYVTEGMRKPAFLSGEQKKAIVDLLFKTNRK
VTVKQLKEDYFKKIECFDSVEISGVEDRFNASLGTYHDLLKIIKDKDFLDNEENEDILEDIV
LILTLFEDREMIEERLKTYAHLFDDKVMKQLKRRRYTGWGRLSRKLINGIRDKQSGKTILDF
LKSDGFANRNFMQLIHDDSLTFKEDIQKAQVSGQGDSLHEHIANLAGSPAIKKGILQTVKVV
DELVKVMGRHKPENIVIEMARENQTTQKGQKNSRERMKRIEEGIKELGSQILKEHPVENTQL
QNEKLYLYYLQNGRDMYVDQELDINRLSDYDVDHIVPQSFLKDDSIDNKVLTRSDKNRGKSD
NVPSEEVVKKMKNYWRQLLNAKLITQRKFDNLTKAERGGLSELDKAGFIKRQLVETRQITKH
VAQILDSRMNTKYDENDKLIREVKVITLKSKLVSDFRKDFQFYKVREINNYHHAHDAYLNAV
VGTALIKKYPKLESEFVYGDYKVYDVRKMIAKSEQEIGKATAKYFFYSNIMNFFKTEITLAN
GEIRKRPLIETNGETGEIVWDKGRDFATVRKVLSMPQVNIVKKTEVQTGGFSKESILPKRNS
DKLIARKKDWDPKKYGGFDSPTVAYSVLVVAKVEKGKSKKLKSVKELLGITIMERSSFEKNP
IDFLEAKGYKEVKKDLIIKLPKYSLFELENGRKRMLASAGELQKGNELALPSKYVNFLYLAS
HYEKLKGSPEDNEQKQLFVEQHKHYLDEIIEQISEFSKRVILADANLDKVLSAYNKHRDKPI
REQAENIIHLFTLTNLGAPAAFKYFDTTIDRKRYTSTKEVLDATLIHQSITGLYETRIDLSQ
LGGD

(single underline: HNH domain; double underline: RuvC domain).

[0254] In some embodiments, wild type Cas9 corresponds to Cas9 from Streptococcus pyogenes (NCBI Reference Sequence: NC_002737.2 (nucleotide sequence as follows); and Uniprot Reference Sequence: Q99ZW2 (amino acid sequence as follows):

ATGGATAAGAAATACTCAATAGGCTTAGATATCGGCACAAATAGCGTCGGATGGGCGGTGAT
CACTGATGAATATAAGGTTCCGTCTAAAAAGTTCAAGGTTCTGGGAAATACAGACCGCCACA
GTATCAAAAAAAATCTTATAGGGGCTCTTTTATTTGACAGTGGAGAGACAGCGGAPGCGACT
CGTCTCAAACGGACAGCTCGTAGAAGGTATACACGTCGGAAGAATCGTATTTGTTATCTACA
GGAGATTTTTTCAAATGAGATGGCGAAAGTAGATGATAGTTTCTTTCATCGACTTGAAGAGT
CTTTTTTGGTGGAAGAAGACAAGAAGCATGAACGTCATCCTATTTTTGGAAATATAGTAGAT
GAAGTTGCTTATCATGAGAAATATCCAACTATCTATCATCTGCGAAAAAAATTGGTAGATTC
TACTGATAAAGCGGATTTGCGCTTAATCTATTTGGCCTTAGCGCATATGATTAAGTTTCGTG
GTCATTTTTTGATTGAGGGAGATTTAAATCCTGATAATAGTGATGTGGACAAACTATTTATC
CAGTTGGTACAAACCTACAATCAATTATTTGAAGAAAACCCTATTAACGCAAGTGGAGTAGA
TGCTAAAGCGATTCTTTCTGCACGATTGAGTAAATCAAGACGATTAGAAAATCTCATTGCTC
AGCTCCCCGGTGAGAAGAAAAATGGCTTATTTGGGAATCTCATTGCTTTGTCATTGGGTTTG
ACCCCTAATTTTAAATCAAATTTTGATTTGGCAGAAGATGCTAAATTACAGCTTTCAAAAGA
TACTTACGATGATGATTTAGATAATTTATTGGCGCAAATTGGAGATCAATATGCTGATTTGT
TTTTGGCAGCTAAGAATTTATCAGATGCTATTTTACTTTCAGATATCCTAAGAGTAAATACT
GAAATAACTAAGGCTCCCCTATCAGCTTCAATGATTAAACGCTACGATGAACATCATCAAGA
CTTGACTCTTTTAAAAGCTTTAGTTCGACAACAACTTCCAGAAAAGTATAAAGAAATCTTTT
TTGATCAATCAAAAAACGGATATGCAGGTTATATTGATGGGGGAGCTAGCCAAGAAGAATTT
TATAAATTTATCAAACCAATTTTAGAAAAAATGGATGGTACTGAGGAATTATTGGTGAAACT
AAATCGTGAAGATTTGCTGCGCAAGCAACGGACCTTTGACAACGGCTCTATTCCCCATCAAA
TTCACTTGGGTGAGCTGCATGCTATTTTGAGAAGACAAGAAGACTTTTATCCATTTTTAAAA
GACAATCGTGAGAAGATTGAAAAAATCTTGACTTTTCGAATTCCTTATTATGTTGGTCCATT
GGCGCGTGGCAATAGTCGTTTTGCATGGATGACTCGGAAGTCTGAAGAAACAATTACCCCAT
GGAATTTTGAAGAAGTTGTCGATAAAGGTGCTTCAGCTCAATCATTTATTGAACGCATGACA
AACTTTGATAAAAATCTTCCAAATGAAAAAGTACTACCAAAACATAGTTTGCTTTATGAGTA
TTTTACGGTTTATAACGAATTGACAAAGGTCAAATATGTTACTGAAGGAATGCGAAAACCAG
CATTTCTTTCAGGTGAACAGAAGAAAGCCATTGTTGATTTACTCTTCAAAACAAATCGAAAA
GTAACCGTTAAGCAATTAAAAGAAGATTATTTCAAAAAAATAGAATGTTTTGATAGTGTTGA
AATTTCAGGAGTTGAAGATAGATTTAATGCTTCATTAGGTACCTACCATGATTTGCTAAAAA
TTATTAAAGATAAAGATTTTTTGGATAATGAAGAAAATGAAGATATCTTAGAGGATATTGTT
TTAACATTGACCTTATTTGAAGATAGGGAGATGATTGAGGAAAGACTTAAAACATATGCTCA
CCTCTTTGATGATAAGGTGATGAAACAGCTTAAACGTCGCCGTTATACTGGTTGGGGACGTT
TGTCTCGAAAATTGATTAATGGTATTAGGGATAAGCAATCTGGCAAAACAATATTAGATTTT
TTGAAATCAGATGGTTTTGCCAATCGCAATTTTATGCAGCTGATCCATGATGATAGTTTGAC
ATTTAAAGAAGACATTCAAAAAGCACAAGTGTCTGGACAAGGCGATAGTTTACATGAACATA
TTGCAAATTTAGCTGGTAGCCCTGCTATTAAAAAAGGTATTTTACAGACTGTAAAAGTTGTT
GATGAATTGGTCAAAGTAATGGGGCGGCATAAGCCAGAAAATATCGTTATTGAAATGGCACG
TGAAAATCAGACAACTCAAAAGGGCCAGAAAAATTCGCGAGAGCGTATGAAACGAATCGAAG
AAGGTATCAAAGAATTAGGAAGTCAGATTCTTAAAGAGCATCCTGTTGAAAATACTCAATTG
CAAAATGAAAAGCTCTATCTCTATTATCTCCAAAATGGAAGAGACATGTATGTGGACCAAGA
ATTAGATATTAATCGTTTAAGTGATTATGATGTCGATCACATTGTTCCACAAAGTTTCCTTA
AAGACGATTCAATAGACAATAAGGTCTTAACGCGTTCTGATAAAAATCGTGGTAAATCGGAT
AACGTTCCAAGTGAAGAAGTAGTCAAAAAGATGAAAAACTATTGGAGACAACTTCTAAACGC
CAAGTTAATCACTCAACGTAAGTTTGATAATTTAACGAAAGCTGAACGTGGAGGTTTGAGTG
AACTTGATAAAGCTGGTTTTATCAAACGCCAATTGGTTGAAACTCGCCAAATCACTAAGCAT
GTGGCACAAATTTTGGATAGTCGCATGAATACTAAATACGATGAAAATGATAAACTTATTCG
AGAGGTTAAAGTGATTACCTTAAAATCTAAATTAGTTTCTGACTTCCGAAAAGATTTCCAAT
TCTATAAAGTACGTGAGATTAACAATTACCATCATGCCCATGATGCGTATCTAAATGCCGTC
GTTGGAACTGCTTTGATTAAGAAATATCCAAAACTTGAATCGGAGTTTGTCTATGGTGATTA
TAAAGTTTATGATGTTCGTAAAATGATTGCTAAGTCTGAGCAAGAAATAGGCAAAGCAACCG
CAAAATATTTCTTTTACTCTAATATCATGAACTTCTTCAAAACAGAAATTACACTTGCAAAT
GGAGAGATTCGCAAACGCCCTCTAATCGAAACTAATGGGGAAACTGGAGAAATTGTCTGGGA
TAAAGGGCGAGATTTTGCCACAGTGCGCAAAGTATTGTCCATGCCCCAAGTCAATATTGTCA
AGAAAACAGAAGTACAGACAGGCGGATTCTCCAAGGAGTCAATTTTACCAAAAAGAAATTCG
GACAAGCTTATTGCTCGTAAAAAAGACTGGGATCCAAAAAAATATGGTGGTTTTGATAGTCC
AACGGTAGCTTATTCAGTCCTAGTGGTTGCTAAGGTGGAAAAAGGGAAATCGAAGAAGTTAA
AATCCGTTAAAGAGTTACTAGGGATCACAATTATGGAAAGAAGTTCCTTTGAAAAAAATCCG
ATTGACTTTTTAGAAGCTAAAGGATATAAGGAAGTTAAAAAAGACTTAATCATTAAACTACC
TAAATATAGTCTTTTTGAGTTAGAAAACGGTCGTAAACGGATGCTGGCTAGTGCCGGAGAAT
TACAAAAAGGAAATGAGCTGGCTCTGCCAAGCAAATATGTGAATTTTTTATATTTAGCTAGT
CATTATGAAAAGTTGAAGGGTAGTCCAGAAGATAACGAACAAAAACAATTGTTTGTGGAGCA
GCATAAGCATTATTTAGATGAGATTATTGAGCAAATCAGTGAATTTTCTAAGCGTGTTATTT
TAGCAGATGCCAATTTAGATAAAGTTCTTAGTGCATATAACAAACATAGAGACAAACCAATA
CGTGAACAAGCAGAAAATATTATTCATTTATTTACGTTGACGAATCTTGGAGCTCCCGCTGC
TTTTAAATATTTTGATACAACAATTGATCGTAAACGATATACGTCTACAAAAGAAGTTTTAG
ATGCCACTCTTATCCATCAATCCATCACTGGTCTTTATGAAACACGCATTGATTTGAGTCAG
CTAGGAGGTGACTGA
MDKKYSIGLDIGTNSVGWAVITDEYKVPSKKFKVLGNTDRHSIKKNLIGALLFDSGETAEAT
RLKRTARRRYTRRKNRICYLQEIFSNEMAKVDDSFFHRLEESFLVEEDKKHERHPIFGNIVD
EVAYHEKYPTIYHLRKKLVDSTDKADLRLIYLALAHMIKFRGHFLIEGDLNPDNSDVDKLFI
QLVQTYNQLFEENPINASGVDAKAILSARLSKSRRLENLIAQLPGEKKNGLFGNLIALSLGL
TPNFKSNFDLAEDAKLQLSKDTYDDDLDNLLAQIGDQYADLFLAAKNLSDAILLSDILRVNT
EITKAPLSASMIKRYDEHHQDLTLLKALVRQQLPEKYKEIFFDQSKNGYAGYIDGGASQEEF
YKFIKPILEKMDGTEELLVKLNREDLLRKQRTFDNGSIPHQIHLGELHAILRRQEDFYPFLK
DNREKIEKILTFRIPYYVGPLARGNSRFAWMTRKSEETITPWNFEEVVDKGASAQSFIERMT
NFDKNLPNEKVLPKHSLLYEYFTVYNELTKVKYVTEGMRKPAFLSGEQKKAIVDLLFKTNRK
VTVKQLKEDYFKKIECFDSVEISGVEDRFNASLGTYHDLLKIIKDKDFLDNEENEDILEDIV
LILTLFEDREMIEERLKTYAHLFDDKVMKQLKRRRYTGWGRLSRKLINGIRDKQSGKTILDF
LKSDGFANRNFMQLIHDDSLTFKEDIQKAQVSGQGDSLHEHIANLAGSPAIKKGILQTVKVV
DELVKVMGRHKPENIVIEMARENQTTQKGQKNSRERMKRIEEGIKELGSQILKEHPVENTQL
QNEKLYLYYLQNGRDMYVDQELDINRLSDYDVDHIVPQSFLKDDSIDNKVLTRSDKNRGKSD
NVPSEEVVKKMKNYWRQLLNAKLITQRKFDNLTKAERGGLSELDKAGFIKRQLVETRQITKH
VAQILDSRMNTKYDENDKLIREVKVITLKSKLVSDFRKDFQFYKVREINNYHHAHDAYLNAV
VGTALIKKYPKLESEFVYGDYKVYDVRKMIAKSEQEIGKATAKYFFYSNIMNFFKTEITLAN
GEIRKRPLIETNGETGEIVWDKGRDFATVRKVLSMPQVNIVKKTEVQTGGFSKESILPKRNS
DKLIARKKDWDPKKYGGFDSPTVAYSVLVVAKVEKGKSKKLKSVKELLGITIMERSSFEKNP
IDFLEAKGYKEVKKDLIIKLPKYSLFELENGRKRMLASAGELQKGNELALPSKYVNFLYLAS
HYEKLKGSPEDNEQKQLFVEQHKHYLDEIIEQISEFSKRVILADANLDKVLSAYNKHRDKPI
REQAENIIHLFTLTNLGAPAAFKYFDTTIDRKRYTSTKEVLDATLIHQSITGLYETRIDLSQ
LGGD
(single underline: HNH domain; double underline: RuvC domain)

[0255] In some embodiments, Cas9 refers to Cas9 from: Corynebacterium ulcerans (NCBI Refs: NC_015683.1, NC_017317.1); Corynebacterium diphtheria (NCBI Refs: NC_016782.1, NC_016786.1); Spiroplasma syrphidicola (NCBI Ref: NC_021284.1); Prevotella intermedia (NCBI Ref: NC_017861.1); Spiroplasma taiwanense (NCBI Ref: NC_021846.1); Streptococcus iniae (NCBI Ref: NC_021314.1); Belliella baltica (NCBI Ref: NC_018010.1); Psychrojlexus torquisI (NCBI Ref: NC_018721.1); Streptococcus thermophilus (NCBI Ref: YP_820832.1), Listeria innocua (NCBI Ref: NP_472073.1), Campylobacter jejuni (NCBI Ref: YP_002344900.1) or Neisseria meningitidis (NCBI Ref: YP 002342100.1) or to a Cas9 from any other organism.

[0256] It should be appreciated that additional Cas9 proteins (e.g., a nuclease dead Cas9 (dCas9), a Cas9 nickase (nCas9), or a nuclease active Cas9), including variants and homologs thereof, are within the scope of this disclosure. Exemplary Cas9 proteins include, without limitation, those provided below. In some embodiments, the Cas9 protein is a nuclease dead Cas9 (dCas9). In some embodiments, the Cas9 protein is a Cas9 nickase (nCas9). In some embodiments, the Cas9 protein is a nuclease active Cas9.

[0257] In some embodiments, the Cas9 domain is a nuclease-inactive Cas9 domain (dCas9). For example, the dCas9 domain may bind to a duplexed nucleic acid molecule (e.g., via a gRNA molecule) without cleaving either strand of the duplexed nucleic acid molecule. In some embodiments, the nuclease-inactive dCas9 domain comprises a D10X mutation and a H840X mutation of the amino acid sequence set forth herein, or a corresponding mutation in any of the amino acid sequences provided herein, wherein X is any amino acid change. In some embodiments, the nuclease-inactive dCas9 domain comprises a D10A mutation and a H840A mutation of the amino acid sequence set forth herein, or a corresponding mutation in any of the amino acid sequences provided herein. As one example, a nuclease-inactive Cas9 domain comprises the amino acid sequence set forth in Cloning vector pPlatTET-gRNA2 (Accession No. BAV54124).

[0258] The amino acid sequence of an exemplary catalytically inactive Cas9 (dCas9) is as follows:

MDKKYSIGLAIGTNSVGWAVITDEYKVPSKKFKVLGNTDRHSIKKNLIGA
LLFDSGETAEATRLKRTARRRYTRRKNRICYLQEIFSNEMAKVDDSFFHR
LEESFLVEEDKKHERHPIFGNIVDEVAYHEKYPTIYHLRKKLVDSTDKAD
LRLIYLALAHMIKFRGHFLIEGDLNPDNSDVDKLFIQLVQTYNQLFEENP
INASGVDAKAILSARLSKSRRLENLIAQLPGEKKNGLFGNLIALSLGLTP
NFKSNFDLAEDAKLQLSKDTYDDDLDNLLAQIGDQYADLFLAAKNLSDAI
LLSDILRVNTEITKAPLSASMIKRYDEHHQDLTLLKALVRQQLPEKYKEI
FFDQSKNGYAGYIDGGASQEEFYKFIKPILEKMDGTEELLVKLNREDLLR
KQRTFDNGSIPHQIHLGELHAILRRQEDFYPFLKDNREKIEKILTFRIPY
YVGPLARGNSRFAWMTRKSEETITPWNFEEVVDKGASAQSFIERMTNFDK
NLPNEKVLPKHSLLYEYFTVYNELTKVKYVTEGMRKPAFLSGEQKKAIVD
LLFKTNRKVTVKQLKEDYFKKIECFDSVEISGVEDRFNASLGTYHDLLKI
IKDKDFLDNEENEDILEDIVLTLTLFEDREMIEERLKTYAHLFDDKVMKQ
LKRRRYTGWGRLSRKLINGIRDKQSGKTILDFLKSDGFANRNFMQLIHDD
SLTFKEDIQKAQVSGQGDSLHEHIANLAGSPAIKKGILQTVKVVDELVKV
MGRHKPENIVIEMARENQTTQKGQKNSRERMKRIEEGIKELGSQILKEHP
VENTQLQNEKLYLYYLQNGRDMYVDQELDINRLSDYDVDAIVPQSFLKDD
SIDNKVLTRSDKNRGKSDNVPSEEVVKKMKNYWRQLLNAKLITQRKFDNL
TKAERGGLSELDKAGFIKRQLVETRQITKHVAQILDSRMNTKYDENDKLI
REVKVITLKSKLVSDFRKDFQFYKVREINNYHHAHDAYLNAVVGTALIKK
YPKLESEFVYGDYKVYDVRKMIAKSEQEIGKATAKYFFYSNIMNFFKTEI
TLANGEIRKRPLIETNGETGEIVWDKGRDFATVRKVLSMPQVNIVKKTEV
QTGGFSKESILPKRNSDKLIARKKDWDPKKYGGFDSPTVAYSVLVVAKVE
KGKSKKLKSVKELLGITIMERSSFEKNPIDFLEAKGYKEVKKDLIIKLPK
YSLFELENGRKRMLASAGELQKGNELALPSKYVNFLYLASHYEKLKGSPE
DNEQKQLFVEQHKHYLDEIIEQISEFSKRVILADANLDKVLSAYNKHRDK
PIREQAENIIHLFTLTNLGAPAAFKYFDTTIDRKRYTSTKEVLDATLIHQ
SITGLYETRIDLSQLGGD

(see, e.g., Qi et al., “Repurposing CRISPR as an RNA-guided platform for sequence-specific control of gene expression.” Cell. 2013; 152(5):1173-83, the entire contents of which are incorporated herein by reference).

[0259] In some embodiments, a Cas9 nuclease has an inactive (e.g., an inactivated) DNA cleavage domain, that is, the Cas9 is a nickase, referred to as an “nCas9” protein (for “nickase” Cas9). A nuclease-inactivated Cas9 protein may interchangeably be referred to as a “dCas9” protein (for nuclease-“dead” Cas9) or catalytically inactive Cas9. Methods for generating a Cas9 protein (or a fragment thereof) having an inactive DNA cleavage domain are known (See, e.g., Jinek et al., Science. 337:816-821(2012); Qi et al., “Repurposing CRISPR as an RNA-Guided Platform for Sequence-Specific Control of Gene Expression” (2013) Cell. 28; 152(5):1173-83, the entire contents of each of which are incorporated herein by reference). For example, the DNA cleavage domain of Cas9 is known to include two subdomains, the HNH nuclease subdomain and the RuvC1 subdomain. The HNH subdomain cleaves the strand complementary to the gRNA, whereas the RuvC1 subdomain cleaves the non-complementary strand. Mutations within these subdomains can silence the nuclease activity of Cas9. For example, the mutations D10A and H840A completely inactivate the nuclease activity of S. pyogenes Cas9 (Jinek et al., Science. 337:816-821(2012); Qi et al., Cell. 28; 152(5):1173-83 (2013)).

[0260] In some embodiments, the dCas9 domain comprises an amino acid sequence that is at least 60%, at least 65%, at least 70%, at least 75%, at least 80%, at least 85%, at least 90%, at least 95%, at least 96%, at least 97%, at least 98%, at least 99%, or at least 99.5% identical to any one of the dCas9 domains provided herein. In some embodiments, the Cas9 domain comprises an amino acid sequences that has 1, 2, 3, 4, 5, 6, 7, 8, 9, 10, 11, 12, 13, 14, 15, 16, 17, 18, 19, 20, 21, 22, 23, 24, 25, 26, 27, 28, 29, 30, 31, 32, 33, 34, 35, 36, 37, 38, 39, 40, 41, 42, 43, 44, 45, 46, 47, 48, 49, 50 or more or more mutations compared to any one of the amino acid sequences set forth herein. In some embodiments, the Cas9 domain comprises an amino acid sequence that has at least 10, at least 15, at least 20, at least 30, at least 40, at least 50, at least 60, at least 70, at least 80, at least 90, at least 100, at least 150, at least 200, at least 250, at least 300, at least 350, at least 400, at least 500, at least 600, at least 700, at least 800, at least 900, at least 1000, at least 1100, or at least 1200 identical contiguous amino acid residues as compared to any one of the amino acid sequences set forth herein.

[0261] In some embodiments, dCas9 corresponds to, or comprises in part or in whole, a Cas9 amino acid sequence having one or more mutations that inactivate the Cas9 nuclease activity. For example, in some embodiments, a dCas9 domain comprises D10A and an H840A mutation or corresponding mutations in another Cas9.

[0262] In some embodiments, the dCas9 comprises the amino acid sequence of dCas9 (D10A and H840A):

MDKKYSIGLAIGTNSVGWAVITDEYKVPSKKFKVLGNTDRHSIKKNLIGA
LLFDSGETAEATRLKRTARRRYTRRKNRICYLQEIFSNEMAKVDDSFFHR
LEESFLVEEDKKHERHPIFGNIVDEVAYHEKYPTIYHLRKKLVDSTDKAD
LRLIYLALAHMIKFRGHFLIEGDLNPDNSDVDKLFIQLVQTYNQLFEENP
INASGVDAKAILSARLSKSRRLENLIAQLPGEKKNGLFGNLIALSLGLTP
NFKSNFDLAEDAKLQLSKDTYDDDLDNLLAQIGDQYADLFLAAKNLSDAI
LLSDILRVNTEITKAPLSASMIKRYDEHHQDLTLLKALVRQQLPEKYKEI
FFDQSKNGYAGYIDGGASQEEFYKFIKPILEKMDGTEELLVKLNREDLLR
KQRTFDNGSIPHQIHLGELHAILRRQEDFYPFLKDNREKIEKILTFRIPY
YVGPLARGNSRFAWMTRKSEETITPWNFEEVVDKGASAQSFIERMTNFDK
NLPNEKVLPKHSLLYEYFTVYNELTKVKYVTEGMRKPAFLSGEQKKAIVD
LLFKTNRKVTVKQLKEDYFKKIECFDSVEISGVEDRFNASLGTYHDLLKI
IKDKDFLDNEENEDILEDIVLTLTLFEDREMIEERLKTYAHLFDDKVMKQ
LKRRRYTGWGRLSRKLINGIRDKQSGKTILDFLKSDGFANRNFMQLIHDD
SLTFKEDIQKAQVSGQGDSLHEHIANLAGSPAIKKGILQTVKVVDELVKV
MGRHKPENIVIEMARENQTTQKGQKNSRERMKRIEEGIKELGSQILKEHP
VENTQLQNEKLYLYYLQNGRDMYVDQELDINRLSDYDVDAIVPQSFLKDD
SIDNKVLTRSDKNRGKSDNVPSEEVVKKMKNYWRQLLNAKLITQRKFDNL
TKAERGGLSELDKAGFIKRQLVETRQITKHVAQILDSRMNTKYDENDKLI
REVKVITLKSKLVSDFRKDFQFYKVREINNYHHAHDAYLNAVVGTALIKK
YPKLESEFVYGDYKVYDVRKMIAKSEQEIGKATAKYFFYSNIMNFFKTEI
TLANGEIRKRPLIETNGETGEIVWDKGRDFATVRKVLSMPQVNIVKKTEV
QTGGFSKESILPKRNSDKLIARKKDWDPKKYGGFDSPTVAYSVLVVAKVE
KGKSKKLKSVKELLGITIMERSSFEKNPIDFLEAKGYKEVKKDLIIKLPK
YSLFELENGRKRMLASAGELQKGNELALPSKYVNFLYLASHYEKLKGSPE
DNEQKQLFVEQHKHYLDEIIEQISEFSKRVILADANLDKVLSAYNKHRDK
PIREQAENIIHLFTLTNLGAPAAFKYFDTTIDRKRYTSTKEVLDATLIHQ
SITGLYETRIDLSQLGGD
(single underline: HNH domain; double underline:
RuvC domain).

[0263] In some embodiments, the Cas9 domain comprises a D10A mutation, while the residue at position 840 remains a histidine in the amino acid sequence provided above, or at corresponding positions in any of the amino acid sequences provided herein.

[0264] In other embodiments, dCas9 variants having mutations other than D10A and H840A are provided, which, e.g., result in nuclease inactivated Cas9 (dCas9). Such mutations, by way of example, include other amino acid substitutions at D10 and H840, or other substitutions within the nuclease domains of Cas9 (e.g., substitutions in the HNH nuclease subdomain and/or the RuvC1 subdomain). In some embodiments, variants or homologues of dCas9 are provided which are at least about 70% identical, at least about 80% identical, at least about 90% identical, at least about 95% identical, at least about 98% identical, at least about 99% identical, at least about 99.5% identical, or at least about 99.9% identical. In some embodiments, variants of dCas9 are provided having amino acid sequences which are shorter, or longer, by about 5 amino acids, by about 10 amino acids, by about 15 amino acids, by about 20 amino acids, by about 25 amino acids, by about 30 amino acids, by about 40 amino acids, by about 50 amino acids, by about 75 amino acids, by about 100 amino acids or more.

[0265] In some embodiments, the Cas9 domain is a Cas9 nickase. The Cas9 nickase may be a Cas9 protein that is capable of cleaving only one strand of a duplexed nucleic acid molecule (e.g., a duplexed DNA molecule). In some embodiments, the Cas9 nickase cleaves the target strand of a duplexed nucleic acid molecule, meaning that the Cas9 nickase cleaves the strand that is base paired to (complementary to) a gRNA (e.g., an sgRNA) that is bound to the Cas9. In some embodiments, a Cas9 nickase comprises a D10A mutation and has a histidine at position 840. In some embodiments, the Cas9 nickase cleaves the non-target, non-base-edited strand of a duplexed nucleic acid molecule, meaning that the Cas9 nickase cleaves the strand that is not base paired to a gRNA (e.g., an sgRNA) that is bound to the Cas9. In some embodiments, a Cas9 nickase comprises an H840A mutation and has an aspartic acid residue at position 10, or a corresponding mutation. In some embodiments, the Cas9 nickase comprises an amino acid sequence that is at least 60%, at least 65%, at least 70%, at least 75%, at least 80%, at least 85%, at least 90%, at least 95%, at least 96%, at least 97%, at least 98%, at least 99%, or at least 99.5% identical to any one of the Cas9 nickases provided herein. Additional suitable Cas9 nickases will be apparent to those of skill in the art based on this disclosure and knowledge in the field, and are within the scope of this disclosure.

[0266] The amino acid sequence of an exemplary catalytically Cas9 nickase (nCas9) is as follows:

MDKKYSIGLAIGTNSVGWAVITDEYKVPSKKFKVLGNTDRHSIKKNLIGA
LLFDSGETAEATRLKRTARRRYTRRKNRICYLQEIFSNEMAKVDDSFFHR
LEESFLVEEDKKHERHPIFGNIVDEVAYHEKYPTIYHLRKKLVDSTDKAD
LRLIYLALAHMIKFRGHFLIEGDLNPDNSDVDKLFIQLVQTYNQLFEENP
INASGVDAKAILSARLSKSRRLENLIAQLPGEKKNGLFGNLIALSLGLTP
NFKSNFDLAEDAKLQLSKDTYDDDLDNLLAQIGDQYADLFLAAKNLSDAI
LLSDILRVNTEITKAPLSASMIKRYDEHHQDLTLLKALVRQQLPEKYKEI
FFDQSKNGYAGYIDGGASQEEFYKFIKPILEKMDGTEELLVKLNREDLLR
KQRTFDNGSIPHQIHLGELHAILRRQEDFYPFLKDNREKIEKILTFRIPY
YVGPLARGNSRFAWMTRKSEETITPWNFEEVVDKGASAQSFIERMTNFDK
NLPNEKVLPKHSLLYEYFTVYNELTKVKYVTEGMRKPAFLSGEQKKAIVD
LLFKTNRKVTVKQLKEDYFKKIECFDSVEISGVEDRFNASLGTYHDLLKI
IKDKDFLDNEENEDILEDIVLTLTLFEDREMIEERLKTYAHLFDDKVMKQ
LKRRRYTGWGRLSRKLINGIRDKQSGKTILDFLKSDGFANRNFMQLIHDD
SLTFKEDIQKAQVSGQGDSLHEHIANLAGSPAIKKGILQTVKVVDELVKV
MGRHKPENIVIEMARENQTTQKGQKNSRERMKRIEEGIKELGSQILKEHP
VENTQLQNEKLYLYYLQNGRDMYVDQELDINRLSDYDVDHIVPQSFLKDD
SIDNKVLTRSDKNRGKSDNVPSEEVVKKMKNYWRQLLNAKLITQRKFDNL
TKAERGGLSELDKAGFIKRQLVETRQITKHVAQILDSRMNTKYDENDKLI
REVKVITLKSKLVSDFRKDFQFYKVREINNYHHAHDAYLNAVVGTALIKK
YPKLESEFVYGDYKVYDVRKMIAKSEQEIGKATAKYFFYSNIMNFFKTEI
TLANGEIRKRPLIETNGETGEIVWDKGRDFATVRKVLSMPQVNIVKKTEV
QTGGFSKESILPKRNSDKLIARKKDWDPKKYGGFDSPTVAYSVLVVAKVE
KGKSKKLKSVKELLGITIMERSSFEKNPIDFLEAKGYKEVKKDLIIKLPK
YSLFELENGRKRMLASAGELQKGNELALPSKYVNFLYLASHYEKLKGSPE
DNEQKQLFVEQHKHYLDEIIEQISEFSKRVILADANLDKVLSAYNKHRDK
PIREQAENIIHLFTLTNLGAPAAFKYFDTTIDRKRYTSTKEVLDATLIHQ
SITGLYETRIDLSQLGGD

[0267] In some embodiments, Cas9 refers to a Cas9 from archaea (e.g., nanoarchaea), which constitute a domain and kingdom of single-celled prokaryotic microbes. In some embodiments, the programmable nucleotide binding protein may be a CasX or CasY protein, which have been described in, for example, Burstein et al., “New CRISPR-Cas systems from uncultivated microbes.” Cell Res. 2017 Feb. 21. doi: 10.1038/cr.2017.21, the entire contents of which is hereby incorporated by reference. Using genome-resolved metagenomics, a number of CRISPR-Cas systems were identified, including the first reported Cas9 in the archaeal domain of life. This divergent Cas9 protein was found in little-studied nanoarchaea as part of an active CRISPR-Cas system. In bacteria, two previously unknown systems were discovered, CRISPR-CasX and CRISPR-CasY, which are among the most compact systems yet discovered. In some embodiments, in a base editor system described herein Cas9 is replaced by CasX, or a variant of CasX. In some embodiments, in a base editor system described herein Cas9 is replaced by CasY, or a variant of CasY. It should be appreciated that other RNA-guided DNA binding proteins may be used as a nucleic acid programmable DNA binding protein (napDNAbp), and are within the scope of this disclosure.

[0268] In some embodiments, the nucleic acid programmable DNA binding protein (napDNAbp) of any of the fusion proteins provided herein may be a CasX or CasY protein. In some embodiments, the napDNAbp is a CasX protein. In some embodiments, the napDNAbp is a CasY protein. In some embodiments, the napDNAbp comprises an amino acid sequence that is at least 85%, at least 90%, at least 91%, at least 92%, at least 93%, at least 94%, at least 95%, at least 96%, at least 97%, at least 98%, at least 99%, or at ease 99.5% identical to a naturally-occurring CasX or CasY protein. In some embodiments, the programmable nucleotide binding protein is a naturally-occurring CasX or CasY protein. In some embodiments, the programmable nucleotide binding protein comprises an amino acid sequence that is at least 85%, at least 90%, at least 91%, at least 92%, at least 93%, at least 94%, at least 95%, at least 96%, at least 97%, at least 98%, at least 99%, or at ease 99.5% identical to any CasX or CasY protein described herein. It should be appreciated that CasX and CasY from other bacterial species may also be used in accordance with the present disclosure.

[0269] An exemplary CasX ((uniprot.org/uniprot/FONN87; uniprot.org/uniprot/FONH53) tr|F0NN87|F0NN87_SULIHCRISPR-associatedCasx protein OS=Sulfolobus islandicus (strain HVE10/4) GN=SiH_0402 PE=4 SV=1) amino acid sequence is as follows:

MEVPLYNIFGDNYIIQVATEAENSTIYNNKVEIDDEELRNVLNLAYKIAK
NNEDAAAERRGKAKKKKGEEGETTTSNIILPLSGNDKNPWTETLKCYNFP
TTVALSEVFKNFSQVKECEEVSAPSFVKPEFYEFGRSPGMVERTRRVKLE
VEPHYLIIAAAGWVLTRLGKAKVSEGDYVGVNVFTPTRGILYSLIQNVNG
IVPGIKPETAFGLWIARKVVSSVTNPNVSVVRIYTISDAVGQNPTTINGG
FSIDLTKLLEKRYLLSERLEAIARNALSISSNMRERYIVLANYIYEYLTG
SKRLEDLLYFANRDLIMNLNSDDGKVRDLKLISAYVNGELIRGEG.

[0270] An exemplary CasX (>tr|F0NH53|F0NH53_SULIR CRISPR associated protein, Casx OS=Sulfolobus islandicus (strain REY15A) GN=SiRe_0771 PE=4 SV=1) amino acid sequence is as follows:

MEVPLYNIFGDNYIIQVATEAENSTIYNNKVEIDDEELRNVLNLAYKIAK
NNEDAAAERRGKAKKKKGEEGETTTSNIILPLSGNDKNPWTETLKCYNFP
TTVALSEVFKNFSQVKECEEVSAPSFVKPEFYKFGRSPGMVERTRRVKLE
VEPHYLIMAAAGWVLTRLGKAKVSEGDYVGVNVFTPTRGILYSLIQNVNG
IVPGIKPETAFGLWIARKVVSSVTNPNVSVVSIYTISDAVGQNPTTINGG
FSIDLTKLLEKRDLLSERLEAIARNALSISSNMRERYIVLANYIYEYLTG
SKRLEDLLYFANRDLIMNLNSDDGKVRDLKLISAYVNGELIRGEG.
Deltaproteobacteria CasX
MEKRINKIRKKLSADNATKPVSRSGPMKTLLVRVMTDDLKKRLEKRRKKP
EVMPQVISNNAANNLRMLLDDYTKMKEAILQVYWQEFKDDHVGLMCKFAQ
PASKKIDQNKLKPEMDEKGNLTTAGFACSQCGQPLFVYKLEQVSEKGKAY
TNYFGRCNVAEHEKLILLAQLKPVKDSDEAVTYSLGKFGQRALDFYSIHV
TKESTHPVKPLAQIAGNRYASGPVGKALSDACMGTIASFLSKYQDIIIEH
QKVVKGNQKRLESLRELAGKENLEYPSVTLPPQPHTKEGVDfAYNEVIAR
VRMWVNLNLWQKLKLSRDDAKPLLRLKGFPSFPVVERRENEVDWWNTINE
VKKLIDAKRDMGRVFWSGVTAEKRNTILEGYNYLPNENDHKKREGSLENP
KKPAKRQFGDLLLYLEKKYAGDWGKVFDEAWERIDKKIAGLTSHIEREEA
RNAEDAQSKAVLTDWLRAKASFVLERLKEMDEKEFYACEIQLQKWYGDLR
GNPFAVEAENRVVDISGFSIGSDGHSIQYRNLLAWKYLENGKREFYLLMN
YGKKGRIRFTDGTDIKKSGKWQGLLYGGGKAKVIDLTFDPDDEQLIILPL
AFGTRQGREFIWNDLLSLETGLIKLANGRVIEKTIYNKKIGRDEPALFVA
LTFERREVVDPSNIKPVNLIGVARGENIPAVIALTDPEGCPLPEFKDSSG
GPTDILRIGEGYKEKQRAIQAAKEVEQRRAGGYSRKFASKSRNLADDMVR
NSARDLFYHAVTHDAVLVFANLSRGFGRQGKRTFMTERQYTKMEDWLTAK
LAYEGLTSKTYLSKTLAQYTSKTCSNCGFTITYADMDVMLVRLKKTSDGW
ATTLNNKELKAEYQITYYNRYKRQTVEKELSAELDRLSEESGNNDISKWT
KGRRDEALFLLKKRFSHRPVQEQFVCLDCGHEVHAAEQAALNIARSWLFL
NSNSTEFKSYKSGKQPFVGAWQAFYKRRLKEVWKPNA

[0271] An exemplary CasY ((ncbi.nlm.nih.gov/protein/APG80656.1) >APG80656.1 CRISPR-associated protein CasY [uncultured Parcubacteria group bacterium]) amino acid sequence is as follows:

MSKRHPRISGVKGYRLHAQRLEYTGKSGAMRTIKYPLYSSPSGGRTVPRE
IVSAINDDYVGLYGLSNFDDLYNAEKRNEEKVYSVLDFWYDCVQYGAVFS
YTAPGLLKNVAEVRGGSYELTKTLKGSHLYDELQIDKVIKFLNKKEISRA
NGSLDKLKKDIIDCFKAEYRERHKDQCNKLADDIKNAKKDAGASLGERQK
KLFRDFFGISEQSENDKPSFTNPLNLICCLLPFDTVNNNRNRGEVLFNKL
KEYAQKLDKNEGSLEMWEYIGIGNSGTAFSNFLGEGFLGRLRENKITELK
KAMMDITDAWRGQEQEEELEKRLRILAALTIKLREPKFDNHWGGYRSDIN
GKLSSWLQNYINQTVKIKEDLKGHKKDLKKAKEMINRFGESDTKEEAVVS
SLLESIEKIVPDDSADDEKPDIPAIAIYRRFLSDGRLTLNRFVQREDVQE
ALIKERLEAEKKKKPKKRKKKSDAEDEKETIDFKELFPHLAKPLKLVPNF
YGDSKRELYKKYKNAAIYTDALWKAVEKIYKSAFSSSLKNSFFDTDFDKD
FFIKRLQKIFSVYRRFNTDKWKPIVKNSFAPYCDIVSLAENEVLYKPKQS
RSRKSAAIDKNRVRLPSTENIAKAGIALARELSVAGFDWKDLLKKEEHEE
YIDLIELHKTALALLLAVTETQLDISALDFVENGTVKDFMKTRDGNLVLE
GRFLEMFSQSIVFSELRGLAGLMSRKEFITRSAIQTMNGKQAELLYIPHE
FQSAKITTPKEMSRAFLDLAPAEFATSLEPESLSEKSLLKLKQMRYYPHY
FGYELTRTGQGIDGGVAENALRLEKSPVKKREIKCKQYKTLGRGQNKIVL
YVRSSYYQTQFLEWFLHRPKNVQTDVAVSGSFLIDEKKVKTRWNYDALTV
ALEPVSGSERVFVSQPFTIFPEKSAEEEGQRYLGIDIGEYGIAYTALEIT
GDSAKILDQNFISDPQLKTLREEVKGLKLDQRRGTFAMPSTKIARIRESL
VHSLRNRIHHLALKHKAKIVYELEVSRFEEGKQKIKKVYATLKKADVYSE
IDADKNLQTTVWGKLAVASEISASYTSQFCGACKKLWRAEMQVDETITTQ
ELIGTVRVIKGGILIDAIKDFMRPPIFDENDTPFPKYRDFCDKHHISKKM
RGNSCLFICPFCRANADADIQASQTIALLRYVKEEKKVEDYFERFRKLKN
IKVLGQMKKI.

[0272] In some embodiments, the nucleic acid programmable DNA binding protein (napDNAbp) is a single effector of a microbial CRISPR-Cas system. Single effectors of microbial CRISPR-Cas systems include, without limitation, Cas9, Cpf1, Cas12b/C2c1, and Cas12c/C2c3. Typically, microbial CRISPR-Cas systems are divided into Class 1 and Class 2 systems. Class 1 systems have multisubunit effector complexes, while Class 2 systems have a single protein effector. For example, Cas9 and Cpf1 are Class 2 effectors. In addition to Cas9 and Cpf1, three distinct Class 2 CRISPR-Cas systems (Cas12b/C2c1, and Cas12c/C2c3) have been described by Shmakov et al., “Discovery and Functional Characterization of Diverse Class 2 CRISPR Cas Systems”, Mol. Cell, 2015 Nov. 5; 60(3): 385-397, the entire contents of which are hereby incorporated by reference. Effectors of two of the systems, Cas12b/C2c1, and Cas12c/C2c3, contain RuvC-like endonuclease domains related to Cpf1. A third system contains an effector with two predicated HEPN RNase domains. Production of mature CRISPR RNA is tracrRNA-independent, unlike production of CRISPR RNA by Cas12b/C2c1. Cas12b/C2c1 depends on both CRISPR RNA and tracrRNA for DNA cleavage.

[0273] The crystal structure of Alicyclobaccillus acidoterrastris Cas12b/C2c1 (AacC2c1) has been reported in complex with a chimeric single-molecule guide RNA (sgRNA). See e.g., Liu et al., “C2c1-sgRNA Complex Structure Reveals RNA-Guided DNA Cleavage Mechanism”, Mol. Cell, 2017 Jan. 19; 65(2):310-322, the entire contents of which are hereby incorporated by reference. The crystal structure has also been reported in Alicyclobacillus acidoterrestris C2c1 bound to target DNAs as ternary complexes. See e.g., Yang et al., “PAM-dependent Target DNA Recognition and Cleavage by C2C1 CRISPR-Cas endonuclease”, Cell, 2016 Dec. 15; 167(7):1814-1828, the entire contents of which are hereby incorporated by reference. Catalytically competent conformations of AacC2c1, both with target and non-target DNA strands, have been captured independently positioned within a single RuvC catalytic pocket, with Cas12b/C2c1-mediated cleavage resulting in a staggered seven-nucleotide break of target DNA. Structural comparisons between Cas12b/C2c1 ternary complexes and previously identified Cas9 and Cpf1 counterparts demonstrate the diversity of mechanisms used by CRISPR-Cas9 systems.

[0274] In some embodiments, the nucleic acid programmable DNA binding protein (napDNAbp) of any of the fusion proteins provided herein may be a Cas12b/C2c1, or a Cas12c/C2c3 protein. In some embodiments, the napDNAbp is a Cas12b/C2c1 protein. In some embodiments, the napDNAbp is a Cas12c/C2c3 protein. In some embodiments, the napDNAbp comprises an amino acid sequence that is at least 85%, at least 90%, at least 91%, at least 92%, at least 93%, at least 94%, at least 95%, at least 96%, at least 97%, at least 98%, at least 99%, or at ease 99.5% identical to a naturally-occurring Cas12b/C2c1 or Cas12c/C2c3 protein. In some embodiments, the napDNAbp is a naturally-occurring Cas12b/C2c1 or Cas12c/C2c3 protein. In some embodiments, the napDNAbp comprises an amino acid sequence that is at least 85%, at least 90%, at least 91%, at least 92%, at least 93%, at least 94%, at least 95%, at least 96%, at least 97%, at least 98%, at least 99%, or at ease 99.5% identical to any one of the napDNAbp sequences provided herein. It should be appreciated that Cas12b/C2c1 or Cas12c/C2c3 from other bacterial species may also be used in accordance with the present disclosure.

[0275] A Cas12b/C2c1 ((uniprot.org/uniprot/T0D7A2 #2) sp|TOD7A2|C2C1_ALIAG CRISPR-associated endonuclease C2c1 OS=Alicyclobacillus acido-terrestris (strain ATCC 49025/DSM 3922/CIP 106132/NCIMB 13137/GD3B) GN=c2c1 PE=1 SV=1) amino acid sequence is as follows:

MAVKSIKVKLRLDDMPEIRAGLWKLHKEVNAGVRYYTEWLSLLRQENLYR
RSPNGDGEQECDKTAEECKAELLERLRARQVENGHRGPAGSDDELLQLAR
QLYELLVPQAIGAKGDAQQIARKFLSPLADKDAVGGLGIAKAGNKPRWVR
MREAGEPGWEEEKEKAETRKSADRTADVLRALADFGLKPLMRVYTDSEMS
SVEWKPLRKGQAVRTWDRDMFQQAIERMMSWESWNQRVGQEYAKLVEQKN
RFEQKNFVGQEHLVHLVNQLQQDMKEASPGLESKEQTAHYVTGRALRGSD
KVFEKWGKLAPDAPFDLYDAEIKNVQRRNTRRFGSHDLFAKLAEPEYQAL
WREDASFLTRYAVYNSILRKLNHAKMFATFTLPDATAHPIWTRFDKLGGN
LHQYTFLFNEFGERRHAIRFHKLLKVENGVAREVDDVTVPISMSEQLDNL
LPRDPNEPIALYFRDYGAEQHFTGEFGGAKIQCRRDQLAHMHRRRGARDV
YLNVSVRVQSQSEARGERRPPYAAVFRLVGDNHRAFVHFDKLSDYLAEHP
DDGKLGSEGLLSGLRVMSVDLGLRTSASISVFRVARKDELKPNSKGRVPF
FFPIKGNDNLVAVHERSQLLKLPGETESKDLRAIREERQRTLRQLRTQLA
YLRLLVRCGSEDVGRRERSWAKLIEQPVDAANHMTPDWREAFENELQKLK
SLHGICSDKEWMDAVYESVRRVWRHMGKQVRDWRKDVRSGERPKIRGYAK
DVVGGNSIEQIEYLERQYKFLKSWSFFGKVSGQVIRAEKGSRFAITLREH
IDHAKEDRLKKLADRIIMEALGYVYALDERGKGKWVAKYPPCQLILLEEL
SEYQFNNDRPPSENNQLMQWSHRGVFQELINQAQVHDLLVGTMYAAFSSR
FDARTGAPGIRCRRVPARCTQEHNPEPFPWWLNKFVVEHTLDACPLRADD
LIPTGEGEIFVSPFSAEEGDFHQIHADLNAAQNLQQRLWSDFDISQIRLR
CDWGEVDGELVLIPRLTGKRTADSYSNKVFYTNTGVTYYERERGKKRRKV
FAQEKLSEEEAELLVEADEAREKSVVLMRDPSGIINRGNWTRQKEFWSMV
NQRIEGYLVKQIRSRVPLQDSACENTGDI.

[0276] BhCas12b (Bacillus hisashii) NCBI Reference Sequence: WP_095142515

MAPKKKRKVGIHGVPAAATRSFILKIEPNEEVKKGLWKTHEVLNHGIAYY
MNILKLIRQEAIYEHHEQDPKNPKKVSKAEIQAELWDFVLKMQKCNSFTH
EVDKDEVFNILRELYEELVPSSVEKKGEANQLSNKFLYPLVDPNSQSGKG
TASSGRKPRWYNLKIAGDPSWEEEKKKWEEDKKKDPLAKILGKLAEYGLI
PLFIPYTDSNEPIVKEIKWMEKSRNQSVRRLDKDMFIQALERFLSWESWN
LKVKEEYEKVEKEYKTLEERIKEDIQALKALEQYEKERQEQLLRDTLNTN
EYRLSKRGLRGWREIIQKWLKMDENEPSEKYLEVFKDYQRKHPREAGDYS
VYEFLSKKENHFIWRNHPEYPYLYATFCEIDKKKKDAKQQATFTLADPIN
HPLWVRFEERSGSNLNKYRILTEQLHTEKLKKKLTVQLDRLIYPTESGGW
EEKGKVDIVLLPSRQFYNQIFLDIEEKGKHAFTYKDESIKFPLKGTLGGA
RVQFDRDHLRRYPHKVESGNVGRIYFNMTVNIEPTESPVSKSLKIHRDDF
PKVVNFKPKELTEWIKDSKGKKLKSGIESLEIGLRVMSIDLGQRQAAAAS
IFEVVDQKPDIEGKLFFPIKGTELYAVHRASFNIKLPGETLVKSREVLRK
AREDNLKLMNQKLNFLRNVLHFQQFEDITEREKRVTKWISRQENSDVPLV
YQDELIQIRELMYKPYKDWVAFLKQLHKRLEVEIGKEVKHWRKSLSDGRK
GLYGISLKNIDEIDRTRKFLLRWSLRPTEPGEVRRLEPGQRFAIDQLNHL
NALKEDRLKKMANTIIMHALGYCYDVRKKKWQAKNPACQIILFEDLSNYN
PYEERSRFENSKLMKWSRREIPRQVALQGEIYGLQVGEVGAQFSSRFHAK
TGSPGIRCSVVTKEKLQDNRFFKNLQREGRLTLDKIAVLKEGDLYPDKGG
EKFISLSKDRKCVITHADINAAQNLQKRFWIRTHGFYKVYCKAYQVDGQT
VYIPESKDQKQKIIEEFGEGYFILKDGVYEWVNAGKLKIKKGSSKQSSSE
LVDSDILKDSFDLASELKGEKLMLYRDPSGNVFPSDKWMAAGVFFGKLER
ILISKLTNQYSISTIEDDSSKQSMKRPAATKKAGQAKKKK

[0277] In some embodiments, the Cas12b is BvCas12B, which is a variant of BhCas12b and comprises the following changes relative to BhCas12B: S893R, K846R, and E837G. BvCas12b (Bacillus sp. V3-13) NCBI Reference Sequence: WP 101661451.1

MAIRSIKLKMKTNSGTDSIYLRKALWRTHQLINEGIAYYMNLLTLYRQEA
IGDKTKEAYQAELINIIRNQQRNNGSSEEHGSDQEILALLRQLYELIIPS
SIGESGDANQLGNKFLYPLVDPNSQSGKGTSNAGRKPRWKRLKEEGNPDW
ELEKKKDEERKAKDPTVKIFDNLNKYGLLPLFPLFTNIQKDIEWLPLGKR
QSVRKWDKDMFIQAIERLLSWESWNRRVADEYKQLKEKTESYYKEHLTGG
EEWIEKIRKFEKERNMELEKNAFAPNDGYFITSRQIRGWDRVYEKWSKLP
ESASPEELWKVVAEQQNKMSEGFGDPKVFSFLANRENRDIWRGHSERIYH
IAAYNGLQKKLSRTKEQATFTLPDAIEHPLWIRYESPGGTNLNLFKLEEK
QKKNYYVTLSKIIWPSEEKWIEKENIEIPLAPSIQFNRQIKLKQHVKGKQ
EISFSDYSSRISLDGVLGGSRIQFNRKYIKNHKELLGEGDIGPVFFNLVV
DVAPLQETRNGRLQSPIGKALKVISSDFSKVIDYKPKELMDWMNTGSASN
SFGVASLLEGMRVMSIDMGQRTSASVSIFEVVKELPKDQEQKLFYSINDT
ELFAIHKRSFLLNLPGEVVTKNNKQQRQERRKKRQFVRSQIRMLANVLRL
ETKKTPDERKKAIHKLMEIVQSYDSWTASQKEVWEKELNLLTNMAAFNDE
IWKESLVELHHRIEPYVGQIVSKWRKGLSEGRKNLAGISMWNIDELEDTR
RLLISWSKRSRTPGEANRIEIDEPFGSSLLQHIQNVKDDRLKQMANLIIM
TALGFKYDKEEKDRYKRWKETYPACQIILFENLNRYLFNLDRSRRENSRL
MKWAHRSIPRTVSMQGEMFGLQVGDVRSEYSSRFHAKTGAPGIRCHALTE
EDLKAGSNTLKRLIEDGFINESELAYLKKGDIIPSQGGELFVTLSKRYKK
DSDNNELTVIHADINAAQNLQKRFWQQNSEVYRVPCQLARMGEDKLYIPK
SQTETIKKYFGKGSFVKNNTEQEVYKWEKSEKMKIKTDTTFDLQDLDGFE
DISKTIELAQEQQKKYLTMFRDPSGYFFNNETWRPQKEYWSIVNNIIKSC
LKKKILSNKVEL

[0278] The Cas9 nuclease has two functional endonuclease domains: RuvC and HNH. Cas9 undergoes a conformational change upon target binding that positions the nuclease domains to cleave opposite strands of the target DNA. The end result of Cas9-mediated DNA cleavage is a double-strand break (DSB) within the target DNA (˜3-4 nucleotides upstream of the PAM sequence). The resulting DSB is then repaired by one of two general repair pathways: (1) the efficient but error-prone non-homologous end joining (NHEJ) pathway; or (2) the less efficient but high-fidelity homology directed repair (HDR) pathway.

[0279] The “efficiency” of non-homologous end joining (NHEJ) and/or homology directed repair (HDR) can be calculated by any convenient method. For example, in some cases, efficiency can be expressed in terms of percentage of successful HDR. For example, a surveyor nuclease assay can be used to generate cleavage products and the ratio of products to substrate can be used to calculate the percentage. For example, a surveyor nuclease enzyme can be used that directly cleaves DNA containing a newly integrated restriction sequence as the result of successful HDR. More cleaved substrate indicates a greater percent HDR (a greater efficiency of HDR). As an illustrative example, a fraction (percentage) of HDR can be calculated using the following equation [(cleavage products)/(substrate plus cleavage products)] (e.g., (b+c)/(a+b+c), where “a” is the band intensity of DNA substrate and “b” and “c” are the cleavage products).

[0280] In some cases, efficiency can be expressed in terms of percentage of successful NHEJ. For example, a T7 endonuclease I assay can be used to generate cleavage products and the ratio of products to substrate can be used to calculate the percentage NHEJ. T7 endonuclease Icleaves mismatched heteroduplex DNA which arises from hybridization of wild-type and mutant DNA strands (NHEJ generates small random insertions or deletions (indels) at the site of the original break). More cleavage indicates a greater percent NHEJ (a greater efficiency of NHEJ). As an illustrative example, a fraction (percentage) of NHEJ can be calculated using the following equation: (1−(1−(b+c)/(a+b+c))^{1/2})×100, where “a” is the band intensity of DNA substrate and “b” and “c” are the cleavage products (Ran et. al., Cell. 2013 Sep. 12; 154(6):1380-9; and Ran et al., Nat Protoc. 2013 November; 8(11): 2281-2308).

[0281] The NHEJ repair pathway is the most active repair mechanism, and it frequently causes small nucleotide insertions or deletions (indels) at the DSB site. The randomness of NHEJ-mediated DSB repair has important practical implications, because a population of cells expressing Cas9 and a gRNA or a guide polynucleotide can result in a diverse array of mutations. In most cases, NHEJ gives rise to small indels in the target DNA that result in amino acid deletions, insertions, or frameshift mutations leading to premature stop codons within the open reading frame (ORF) of the targeted gene. The ideal end result is a loss-of-function mutation within the targeted gene.

[0282] While NHEJ-mediated DSB repair often disrupts the open reading frame of the gene, homology directed repair (HDR) can be used to generate specific nucleotide changes ranging from a single nucleotide change to large insertions like the addition of a fluorophore or tag. In order to utilize HDR for gene editing, a DNA repair template containing the desired sequence can be delivered into the cell type of interest with the gRNA(s) and Cas9 or Cas9 nickase. The repair template can contain the desired edit as well as additional homologous sequence immediately upstream and downstream of the target (termed left & right homology arms). The length of each homology arm can be dependent on the size of the change being introduced, with larger insertions requiring longer homology arms. The repair template can be a single-stranded oligonucleotide, double-stranded oligonucleotide, or a double-stranded DNA plasmid. The efficiency of HDR is generally low (<10% of modified alleles) even in cells that express Cas9, gRNA and an exogenous repair template. The efficiency of HDR can be enhanced by synchronizing the cells, since HDR takes place during the S and G2 phases of the cell cycle. Chemically or genetically inhibiting genes involved in NHEJ can also increase HDR frequency.

[0283] In some embodiments, Cas9 is a modified Cas9. A given gRNA targeting sequence can have additional sites throughout the genome where partial homology exists. These sites are called off-targets and need to be considered when designing a gRNA. In addition to optimizing gRNA design, CRISPR specificity can also be increased through modifications to Cas9. Cas9 generates double-strand breaks (DSBs) through the combined activity of two nuclease domains, RuvC and HNH. Cas9 nickase, a D10A mutant of SpCas9, retains one nuclease domain and generates a DNA nick rather than a DSB. The nickase system can also be combined with HDR-mediated gene editing for specific gene edits.

[0284] In some cases, Cas9 is a variant Cas9 protein. A variant Cas9 polypeptide has an amino acid sequence that is different by one amino acid (e.g., has a deletion, insertion, substitution, fusion) when compared to the amino acid sequence of a wild type Cas9 protein. In some instances, the variant Cas9 polypeptide has an amino acid change (e.g., deletion, insertion, or substitution) that reduces the nuclease activity of the Cas9 polypeptide. For example, in some instances, the variant Cas9 polypeptide has less than 50%, less than 40%, less than 30%, less than 20%, less than 10%, less than 5%, or less than 1% of the nuclease activity of the corresponding wild-type Cas9 protein. In some cases, the variant Cas9 protein has no substantial nuclease activity. When a subject Cas9 protein is a variant Cas9 protein that has no substantial nuclease activity, it can be referred to as “dCas9.”

[0285] In some cases, a variant Cas9 protein has reduced nuclease activity. For example, a variant Cas9 protein exhibits less than about 20%, less than about 15%, less than about 10%, less than about 5%, less than about 1%, or less than about 0.1%, of the endonuclease activity of a wild-type Cas9 protein, e.g., a wild-type Cas9 protein.

[0286] In some cases, a variant Cas9 protein can cleave the complementary strand of a guide target sequence but has reduced ability to cleave the non-complementary strand of a double stranded guide target sequence. For example, the variant Cas9 protein can have a mutation (amino acid substitution) that reduces the function of the RuvC domain. As a non-limiting example, in some embodiments, a variant Cas9 protein has a D10A (aspartate to alanine at amino acid position 10) and can therefore cleave the complementary strand of a double stranded guide target sequence but has reduced ability to cleave the non-complementary strand of a double stranded guide target sequence (thus resulting in a single strand break (SSB) instead of a double strand break (DSB) when the variant Cas9 protein cleaves a double stranded target nucleic acid) (see, for example, Jinek et al., Science. 2012 Aug. 17; 337(6096):816-21).

[0287] In some cases, a variant Cas9 protein can cleave the non-complementary strand of a double stranded guide target sequence but has reduced ability to cleave the complementary strand of the guide target sequence. For example, the variant Cas9 protein can have a mutation (amino acid substitution) that reduces the function of the HNH domain (RuvC/HNH/RuvC domain motifs). As a non-limiting example, in some embodiments, the variant Cas9 protein has an H840A (histidine to alanine at amino acid position 840) mutation and can therefore cleave the non-complementary strand of the guide target sequence but has reduced ability to cleave the complementary strand of the guide target sequence (thus resulting in a SSB instead of a DSB when the variant Cas9 protein cleaves a double stranded guide target sequence). Such a Cas9 protein has a reduced ability to cleave a guide target sequence (e.g., a single stranded guide target sequence) but retains the ability to bind a guide target sequence (e.g., a single stranded guide target sequence).

[0288] In some cases, a variant Cas9 protein has a reduced ability to cleave both the complementary and the non-complementary strands of a double stranded target DNA. As a non-limiting example, in some cases, the variant Cas9 protein harbors both the D10A and the H840A mutations such that the polypeptide has a reduced ability to cleave both the complementary and the non-complementary strands of a double stranded target DNA. Such a Cas9 protein has a reduced ability to cleave a target DNA (e.g., a single stranded target DNA) but retains the ability to bind a target DNA (e.g., a single stranded target DNA).

[0289] As another non-limiting example, in some cases, the variant Cas9 protein harbors W476A and W1126A mutations such that the polypeptide has a reduced ability to cleave a target DNA. Such a Cas9 protein has a reduced ability to cleave a target DNA (e.g., a single stranded target DNA) but retains the ability to bind a target DNA (e.g., a single stranded target DNA).

[0290] As another non-limiting example, in some cases, the variant Cas9 protein harbors P475A, W476A, N477A, D1125A, W1126A, and D1127A mutations such that the polypeptide has a reduced ability to cleave a target DNA. Such a Cas9 protein has a reduced ability to cleave a target DNA (e.g., a single stranded target DNA) but retains the ability to bind a target DNA (e.g., a single stranded target DNA).

[0291] As another non-limiting example, in some cases, the variant Cas9 protein harbors H840A, W476A, and W1126A, mutations such that the polypeptide has a reduced ability to cleave a target DNA. Such a Cas9 protein has a reduced ability to cleave a target DNA (e.g., a single stranded target DNA) but retains the ability to bind a target DNA (e.g., a single stranded target DNA). As another non-limiting example, in some cases, the variant Cas9 protein harbors H840A, D10A, W476A, and W1126A, mutations such that the polypeptide has a reduced ability to cleave a target DNA. Such a Cas9 protein has a reduced ability to cleave a target DNA (e.g., a single stranded target DNA) but retains the ability to bind a target DNA (e.g., a single stranded target DNA). In some embodiments, the variant Cas9 has restored catalytic His residue at position 840 in the Cas9 HNH domain (A840H).

[0292] As another non-limiting example, in some cases, the variant Cas9 protein harbors, H840A, P475A, W476A, N477A, D1125A, W1126A, and D1127A mutations such that the polypeptide has a reduced ability to cleave a target DNA. Such a Cas9 protein has a reduced ability to cleave a target DNA (e.g., a single stranded target DNA) but retains the ability to bind a target DNA (e.g., a single stranded target DNA). As another non-limiting example, in some cases, the variant Cas9 protein harbors D10A, H840A, P475A, W476A, N477A, D1125A, W1126A, and D1127A mutations such that the polypeptide has a reduced ability to cleave a target DNA. Such a Cas9 protein has a reduced ability to cleave a target DNA (e.g., a single stranded target DNA) but retains the ability to bind a target DNA (e.g., a single stranded target DNA). In some cases, when a variant Cas9 protein harbors W476A and W1126A mutations or when the variant Cas9 protein harbors P475A, W476A, N477A, D1125A, W1126A, and D1127A mutations, the variant Cas9 protein does not bind efficiently to a PAM sequence. Thus, in some such cases, when such a variant Cas9 protein is used in a method of binding, the method does not require a PAM sequence. In other words, in some cases, when such a variant Cas9 protein is used in a method of binding, the method can include a guide RNA, but the method can be performed in the absence of a PAM sequence (and the specificity of binding is therefore provided by the targeting segment of the guide RNA). Other residues can be mutated to achieve the above effects (i.e., inactivate one or the other nuclease portions). As non-limiting examples, residues D10, G12, G17, E762, H840, N854, N863, H982, H983, A984, D986, and/or A987 can be altered (i.e., substituted). Also, mutations other than alanine substitutions are suitable.

[0293] In some embodiments, a variant Cas9 protein that has reduced catalytic activity (e.g., when a Cas9 protein has a D10, G12, G17, E762, H840, N854, N863, H982, H983, A984, D986, and/or a A987 mutation, e.g., D10A, G12A, G17A, E762A, H840A, N854A, N863A, H982A, H983A, A984A, and/or D986A), the variant Cas9 protein can still bind to target DNA in a site-specific manner (because it is still guided to a target DNA sequence by a guide RNA) as long as it retains the ability to interact with the guide RNA.

[0294] In some embodiments, the variant Cas protein can be spCas9, spCas9-VRQR, spCas9-VRER, xCas9 (sp), saCas9, saCas9-KKH, SpCas9-MQKFRAER, spCas9-MQKSER, spCas9-LRKIQK, or spCas9-LRVSQL.

[0295] In one specific embodiment, a modified SpCas9 including amino acid substitutions D1135M, 51136Q, G1218K, E1219F, A1322R, D1332A, R1335E, and T1337R (SpCas9-MQKFRAER) and having specificity for the altered PAM 5′-NGC-3′ is used.

[0296] Alternatives to S. pyogenes Cas9 can include RNA-guided endonucleases from the Cpf1 family that display cleavage activity in mammalian cells. CRISPR from Prevotella and Francisella 1 (CRISPR/Cpf1) is a DNA-editing technology analogous to the CRISPR/Cas9 system. Cpf1 is an RNA-guided endonuclease of a class II CRISPR/Cas system. This acquired immune mechanism is found in Prevotella and Francisella bacteria. Cpf1 genes are associated with the CRISPR locus, coding for an endonuclease that use a guide RNA to find and cleave viral DNA. Cpf1 is a smaller and simpler endonuclease than Cas9, overcoming some of the CRISPR/Cas9 system limitations. Unlike Cas9 nucleases, the result of Cpf1-mediated DNA cleavage is a double-strand break with a short 3′ overhang. Cpf1's staggered cleavage pattern can open up the possibility of directional gene transfer, analogous to traditional restriction enzyme cloning, which can increase the efficiency of gene editing Like the Cas9 variants and orthologues described above, Cpf1 can also expand the number of sites that can be targeted by CRISPR to AT-rich regions or AT-rich genomes that lack the NGG PAM sites favored by SpCas9. The Cpf1 locus contains a mixed alpha/beta domain, a RuvC-I followed by a helical region, a RuvC-II and a zinc finger-like domain. The Cpf1 protein has a RuvC-like endonuclease domain that is similar to the RuvC domain of Cas9. Furthermore, Cpf1 does not have a HNH endonuclease domain, and the N-terminal of Cpf1 does not have the alpha-helical recognition lobe of Cas9. Cpf1 CRISPR-Cas domain architecture shows that Cpf1 is functionally unique, being classified as Class 2, type V CRISPR system. The Cpf1 loci encode Cas1, Cas2 and Cas4 proteins more similar to types I and III than from type II systems. Functional Cpf1 doesn't need the trans-activating CRISPR RNA (tracrRNA), therefore, only CRISPR (crRNA) is required. This benefits genome editing because Cpf1 is not only smaller than Cas9, but also it has a smaller sgRNA molecule (proximately half as many nucleotides as Cas9). The Cpf1-crRNA complex cleaves target DNA or RNA by identification of a protospacer adjacent motif 5′-YTN-3′ in contrast to the G-rich PAM targeted by Cas9. After identification of PAM, Cpf1 introduces a sticky-end-like DNA double-stranded break of 4 or 5 nucleotides overhang.

[0297] Some aspects of the disclosure provide a nucleic acid programmable DNA binding protein domain and a deaminase domain. Some aspects of the disclosure provide fusion proteins comprising domains that act as nucleic acid programmable DNA binding proteins, which may be used to guide a protein, such as a base editor, to a specific nucleic acid (e.g., DNA or RNA) sequence. In particular embodiments, a fusion protein comprises a nucleic acid programmable DNA binding protein domain and a deaminase domain. DNA binding proteins include, without limitation, Cas9 (e.g., dCas9 and nCas9), Cas12a/Cpf1, Cas12b/C2c1, Cas12c/C2c3, Cas12d/CasY, Cas12e/CasX, Cas12g, Cas12h, and Cas12i. One example of a programmable polynucleotide-binding protein that has different PAM specificity than Cas9 is Clustered Regularly Interspaced Short Palindromic Repeats from Prevotella and Francisella1 (Cpf1). Similar to Cas9, Cpf1 is also a class 2 CRISPR effector. It has been shown that Cpf1 mediates robust DNA interference with features distinct from Cas9. Cpf1 is a single RNA-guided endonuclease lacking tracrRNA, and it utilizes a T-rich protospacer-adjacent motif (TTN, TTTN, or YTN). Moreover, Cpf1 cleaves DNA via a staggered DNA double-stranded break. Out of 16 Cpf1-family proteins, two enzymes from Acidaminococcus and Lachnospiraceae are shown to have efficient genome-editing activity in human cells. Cpf1 proteins are known in the art and have been described previously, for example Yamano et al., “Crystal structure of Cpf1 in complex with guide RNA and target DNA.” Cell (165) 2016, p. 949-962; the entire contents of which is hereby incorporated by reference.

[0298] Also useful in the present compositions and methods are nuclease-inactive Cpf1 (dCpf1) variants that may be used as a guide nucleotide sequence-programmable polynucleotide-binding protein domain. The Cpf1 protein has a RuvC-like endonuclease domain that is similar to the RuvC domain of Cas9 but does not have a HNH endonuclease domain, and the N-terminal of Cpf1 does not have the alfa-helical recognition lobe of Cas9. It was shown in Zetsche et al., Cell, 163, 759-771, 2015 (which is incorporated herein by reference) that, the RuvC-like domain of Cpf1 is responsible for cleaving both DNA strands and inactivation of the RuvC-like domain inactivates Cpf1 nuclease activity. For example, mutations corresponding to D917A, E1006A, or D1255A in Francisella novicida Cpf1 inactivate Cpf1 nuclease activity. In some embodiments, the dCpf1 of the present disclosure comprises mutations corresponding to D917A, E1006A, D1255A, D917A/E1006A, D917A/D1255A, E1006A/D1255A, or D917A/E1006A/D1255A. It is to be understood that any mutations, e.g., substitution mutations, deletions, or insertions that inactivate the RuvC domain of Cpf1, may be used in accordance with the present disclosure.

[0299] In some embodiments, the nucleic acid programmable nucleotide binding protein of any of the fusion proteins provided herein may be a Cpf1 protein. In some embodiments, the Cpf1 protein is a Cpf1 nickase (nCpf1). In some embodiments, the Cpf1 protein is a nuclease inactive Cpf1 (dCpf1). In some embodiments, the Cpf1, the nCpf1, or the dCpf1 comprises an amino acid sequence that is at least 85%, at least 90%, at least 91%, at least 92%, at least 93%, at least 94%, at least 95%, at least 96%, at least 97%, at least 98%, at least 99%, or at least 99.5% identical to a Cpf1 sequence disclosed herein. In some embodiments, the dCpf1 comprises an amino acid sequence that is at least 85%, at least 90%, at least 91%, at least 92%, at least 93%, at least 94%, at least 95%, at least 96%, at least 97%, at least 98%, at least 99%, or at ease 99.5% identical to a Cpf1 sequence disclosed herein, and comprises mutations corresponding to D917A, E1006A, D1255A, D917A/E1006A, D917A/D1255A, E1006A/D1255A, or D917A/E1006A/D1255A. It should be appreciated that Cpf1 from other bacterial species may also be used in accordance with the present disclosure.

[0300] The amino acid sequence of wild type Francisella novicida Cpf1 follows. D917, E1006, and D1255 are bolded and underlined.

MSIYQEFVNKYSLSKTLRFELIPQGKTLENIKARGLILDDEKRAKDYKKA
KQIIDKYHQFFIEEILSSVCISEDLLQNYSDVYFKLKKSDDDNLQKDFKS
AKDTIKKQISEYIKDSEKFKNLFNQNLIDAKKGQESDLILWLKQSKDNGI
ELFKANSDITDIDEALEIIKSFKGWTTYFKGFHENRKNVYSSNDIPTSII
YRIVDDNLPKFLENKAKYESLKDKAPEAINYEQIKKDLAEELTFDIDYKT
SEVNQRVFSLDEVFEIANFNNYLNQSGITKFNTIIGGKFVNGENTKRKGI
NEYINLYSQQINDKTLKKYKMSVLFKQILSDTESKSFVIDKLEDDSDVVT
TMQSFYEQIAAFKTVEEKSIKETLSLLFDDLKAQKLDLSKIYFKNDKSLT
DLSQQVFDDYSVIGTAVLEYITQQIAPKNLDNPSKKEQELIAKKTEKAKY
LSLETIKLALEEFNKHRDIDKQCRFEEILANFAAIPMIFDEIAQNKDNLA
QISIKYQNQGKKDLLQASAEDDVKAIKDLLDQTNNLLHKLKIFHISQSED
KANILDKDEHFYLVFEECYFELANIVPLYNKIRNYITQKPYSDEKFKLNF
ENSTLANGWDKNKEPDNTAILFIKDDKYYLGVMNKKNNKIFDDKAIKENK
GEGYKKIVYKLLPGANKMLPKVFFSAKSIKFYNPSEDILRIRNHSTHTKN
GSPQKGYEKFEFNIEDCRKFIDFYKQSISKHPEWKDFGFRFSDTQRYNSI
DEFYREVENQGYKLTFENISESYIDSVVNQGKLYLFQIYNKDFSAYSKGR
PNLHTLYWKALFDERNLQDVVYKLNGEAELFYRKQSIPKKITHPAKEAIA
NKNKDNPKKESVFEYDLIKDKRFTEDKFFFHCPITINFKSSGANKFNDEI
NLLLKEKANDVHILSI [symbol] RGERHLAYYTLVDGKGNIIKQDTFNIIGNDRMK
TNYHDKLAAIEKDRDSARKDWKKINNIKEMKEGYLSQVVHEIAKLVIEYN
AIVVF [symbol] DLNFGFKRGRFKVEKQVYQKLEKMLIEKLNYLVFKDNEFDKTGG
VLRAYQLTAPFETFKKMGKQTGIIYYVPAGFTSKICPVTGFVNQLYPKYE
SVSKSQEFFSKFDKICYNLDKGYFEFSFDYKNFGDKAAKGKWTIASFGSR
LINFRNSDKNHNWDTREVYPTKELEKLLKDYSIEYGHGECIKAAICGESD
KKFFAKLTSVLNTILQMRNSKTGTELDYLISPVADVNGNFFDSRQAPKNM
PQDA [symbol] ANGAYHIGLKGLMLLGRIKNNQEGKKLNLVIKNEEYFEFVQNRN
N.

[0301] The amino acid sequence of Francisella novicida Cpf1 D917A follows. (A917,

[0302] E1006, and D1255 are bolded and underlined).

MSIYQEFVNKYSLSKTLRFELIPQGKTLENIKARGLILDDEKRAKDYKKAK
QIIDKYHQFFIEEILSSVCISEDLLQNYSDVYFKLKKSDDDNLQKDFKSAK
DTIKKQISEYIKDSEKFKNLFNQNLIDAKKGQESDLILWLKQSKDNGIELF
KANSDITDIDEALEIIKSFKGWTTYFKGFHENRKNVYSSNDIPTSIIYRIV
DDNLPKFLENKAKYESLKDKAPEAINYEQIKKDLAEELTFDIDYKTSEVNQ
RVFSLDEVFEIANFNNYLNQSGITKFNTIIGGKFVNGENTKRKGINEYINL
YSQQINDKTLKKYKMSVLFKQILSDTESKSFVIDKLEDDSDVVTTMQSFYE
QIAAFKTVEEKSIKETLSLLFDDLKAQKLDLSKIYFKNDKSLTDLSQQVFD
DYSVIGTAVLEYITQQIAPKNLDNPSKKEQELIAKKTEKAKYLSLETIKLA
LEEFNKHRDIDKQCRFEEILANFAAIPMIFDEIAQNKDNLAQISIKYQNQG
KKDLLQASAEDDVKAIKDLLDQTNNLLHKLKIFHISQSEDKANILDKDEHF
YLVFEECYFELANIVPLYNKIRNYITQKPYSDEKFKLNFENSTLANGWDKN
KEPDNTAILFIKDDKYYLGVMNKKNNKIFDDKAIKENKGEGYKKIVYKLLP
GANKMLPKVFFSAKSIKFYNPSEDILRIRNHSTHTKNGSPQKGYEKFEFNI
EDCRKFIDFYKQSISKHPEWKDFGFRFSDTQRYNSIDEFYREVENQGYKLT
FENISESYIDSVVNQGKLYLFQIYNKDFSAYSKGRPNLHTLYWKALFDERN
LQDVVYKLNGEAELFYRKQSIPKKITHPAKEAIANKNKDNPKKESVFEYDL
IKDKRFTEDKFFFHCPITINFKSSGANKFNDEINLLLKEKANDVHILSI [symbol] R
GERHLAYYTLVDGKGNIIKQDTFNIIGNDRMKTNYHDKLAAIEKDRDSARK
DWKKINNIKEMKEGYLSQVVHEIAKLVIEYNAIVVF [symbol] DLNFGFKRGRFKVE
KQVYQKLEKMLIEKLNYLVFKDNEFDKTGGVLRAYQLTAPFETFKKMGKQT
GIIYYVPAGFTSKICPVTGFVNQLYPKYESVSKSQEFFSKFDKICYNLDKG
YFEFSFDYKNFGDKAAKGKTNTIASFGSRLINFRNSDKNHWDTREVYPTKE
LEKLLKDYSIEYGHGECIKAAICGESDKKFFAKLTSVLNTILQMRNSKTGT
ELDYLISPVADVNGNFFDSRQAPKNMPQDA [symbol] ANGAYHIGLKGLMLLGRIKN
NQEGKKLNLVIKNEEYFEFVQNRNN.

[0303] The amino acid sequence of Francisella novicida Cpf1 E1006A follows. (D917, A1006, and D1255 are bolded and underlined).

MSIYQEFVNKYSLSKTLRFELIPQGKTLENIKARGLILDDEKRAKDYKKAK
QIIDKYHQFFIEEILSSVCISEDLLQNYSDVYFKLKKSDDDNLQKDFKSAK
DTIKKQISEYIKDSEKFKNLFNQNLIDAKKGQESDLILWLKQSKDNGIELF
KANSDITDIDEALEIIKSFKGWTTYFKGFHENRKNVYSSNDIPTSIIYRIV
DDNLPKFLENKAKYESLKDKAPEAINYEQIKKDLAEELTFDIDYKTSEVNQ
RVFSLDEVFEIANFNNYLNQSGITKFNTIIGGKFVNGENTKRKGINEYINL
YSQQINDKTLKKYKMSVLFKQILSDTESKSFVIDKLEDDSDVVTTMQSFYE
QIAAFKTVEEKSIKETLSLLFDDLKAQKLDLSKIYFKNDKSLTDLSQQVFD
DYSVIGTAVLEYITQQIAPKNLDNPSKKEQELIAKKTEKAKYLSLETIKLA
LEEFNKHRDIDKQCRFEEILANFAAIPMIFDEIAQNKDNLAQISIKYQNQG
KKDLLQASAEDDVKAIKDLLDQTNNLLHKLKIFHISQSEDKANILDKDEHF
YLVFEECYFELANIVPLYNKIRNYITQKPYSDEKFKLNFENSTLANGWDKN
KEPDNTAILFIKDDKYYLGVMNKKNNKIFDDKAIKENKGEGYKKIVYKLLP
GANKMLPKVFFSAKSIKFYNPSEDILRIRNHSTHTKNGSPQKGYEKFEFNI
EDCRKFIDFYKQSISKHPEWKDFGFRFSDTQRYNSIDEFYREVENQGYKLT
FENISESYIDSVVNQGKLYLFQIYNKDFSAYSKGRPNLHTLYWKALFDERN
LQDVVYKLNGEAELFYRKQSIPKKITHPAKEAIANKNKDNPKKESVFEYDL
IKDKRFTEDKFFFHCPITINFKSSGANKFNDEINLLLKEKANDVHILSI [symbol] R
GERHLAYYTLVDGKGNIIKQDTFNIIGNDRMKTNYHDKLAAIEKDRDSARK
DWKKINNIKEMKEGYLSQVVHEIAKLVIEYNAIVVF [symbol] DLNFGFKRGRFKVE
KQVYQKLEKMLIEKLNYLVFKDNEFDKTGGVLRAYQLTAPFETFKKMGKQT
GIIYYVPAGFTSKICPVTGFVNQLYPKYESVSKSQEFFSKFDKICYNLDKG
YFEFSFDYKNFGDKAAKGKWTIASFGSRLINFRNSDKNHNWDTREVYPTKE
LEKLLKDYSIEYGHGECIKAAICGESDKKFFAKLTSVLNTILQMRNSKTGT
ELDYLISPVADVNGNFFDSRQAPKNMPQDA [symbol] ANGAYHIGLKGLMLLGRIKN
NQEGKKLNLVIKNEEYFEFVQNRNN.

[0304] The amino acid sequence of Francisella novicida Cpf1 D1255A follows. (D917, E1006, and A1255 mutation positions are bolded and underlined).

MSIYQEFVNKYSLSKTLRFELIPQGKTLENIKARGLILDDEKRAKDYKKAK
QIIDKYHQFFIEEILSSVCISEDLLQNYSDVYFKLKKSDDDNLQKDFKSAK
DTIKKQISEYIKDSEKFKNLFNQNLIDAKKGQESDLILWLKQSKDNGIELF
KANSDITDIDEALEIIKSFKGWTTYFKGFHENRKNVYSSNDIPTSIIYRIV
DDNLPKFLENKAKYESLKDKAPEAINYEQIKKDLAEELTFDIDYKTSEVNQ
RVFSLDEVFEIANFNNYLNQSGITKFNTIIGGKFVNGENTKRKGINEYINL
YSQQINDKTLKKYKMSVLFKQILSDTESKSFVIDKLEDDSDVVTTMQSFYE
QIAAFKTVEEKSIKETLSLLFDDLKAQKLDLSKIYFKNDKSLTDLSQQVFD
DYSVIGTAVLEYITQQIAPKNLDNPSKKEQELIAKKTEKAKYLSLETIKLA
LEEFNKHRDIDKQCRFEEILANFAAIPMIFDEIAQNKDNLAQISIKYQNQG
KKDLLQASAEDDVKAIKDLLDQTNNLLHKLKIFHISQSEDKANILDKDEHF
YLVFEECYFELANIVPLYNKIRNYITQKPYSDEKFKLNFENSTLANGWDKN
KEPDNTAILFIKDDKYYLGVMNKKNNKIFDDKAIKENKGEGYKKIVYKLLP
GANKMLPKVFFSAKSIKFYNPSEDILRIRNHSTHTKNGSPQKGYEKFEFNI
EDCRKFIDFYKQSISKHPEWKDFGFRFSDTQRYNSIDEFYREVENQGYKLT
FENISESYIDSVVNQGKLYLFQIYNKDFSAYSKGRPNLHTLYWKALFDERN
LQDVVYKLNGEAELFYRKQSIPKKITHPAKEAIANKNKDNPKKESVFEYDL
IKDKRFTEDKFFFHCPITINFKSSGANKFNDEINLLLKEKANDVHILSI [symbol] R
GERHLAYYTLVDGKGNIIKQDTFNIIGNDRMKTNYHDKLAAIEKDRDSARK
DWKKINNIKEMKEGYLSQVVHEIAKLVIEYNAIVVF [symbol] DLNFGFKRGRFKVE
KQVYQKLEKMLIEKLNYLVFKDNEFDKTGGVLRAYQLTAPFETFKKMGKQT
GIIYYVPAGFTSKICPVTGFVNQLYPKYESVSKSQEFFSKFDKICYNLDKG
YFEFSFDYKNFGDKAAKGKWTIASFGSRLINFRNSDKNHNWDTREVYPTKE
LEKLLKDYSIEYGHGECIKAAICGESDKKFFAKLTSVLNTILQMRNSKTGT
ELDYLISPVADVNGNFFDSRQAPKNMPQDA [symbol] NGAYHIGLKGLMLLGRIKNN
QEGKKLNLVIKNEEYFEFVQNRNN

[0305] The amino acid sequence of Francisella novicida Cpf1 D917A/E1006A follows. (A917, A1006, and D1255 are bolded and underlined).

MSIYQEFVNKYSLSKTLRFELIPQGKTLENIKARGLILDDEKRAKDYKKAK
QIIDKYHQFFIEEILSSVCISEDLLQNYSDVYFKLKKSDDDNLQKDFKSAK
DTIKKQISEYIKDSEKFKNLFNQNLIDAKKGQESDLILWLKQSKDNGIELF
KANSDITDIDEALEIIKSFKGWTTYFKGFHENRKNVYSSNDIPTSIIYRIV
DDNLPKFLENKAKYESLKDKAPEAINYEQIKKDLAEELTFDIDYKTSEVNQ
RVFSLDEVFEIANFNNYLNQSGITKFNTIIGGKFVNGENTKRKGINEYINL
YSQQINDKTLKKYKMSVLFKQILSDTESKSFVIDKLEDDSDVVTTMQSFYE
QIAAFKTVEEKSIKETLSLLFDDLKAQKLDLSKIYFKNDKSLTDLSQQVFD
DYSVIGTAVLEYITQQIAPKNLDNPSKKEQELIAKKTEKAKYLSLETIKLA
LEEFNKHRDIDKQCRFEEILANFAAIPMIFDEIAQNKDNLAQISIKYQNQG
KKDLLQASAEDDVKAIKDLLDQTNNLLHKLKIFHISQSEDKANILDKDEHF
YLVFEECYFELANIVPLYNKIRNYITQKPYSDEKFKLNFENSTLANGWDKN
KEPDNTAILFIKDDKYYLGVMNKKNNKIFDDKAIKENKGEGYKKIVYKLLP
GANKMLPKVFFSAKSIKFYNPSEDILRIRNHSTHTKNGSPQKGYEKFEFNI
EDCRKFIDFYKQSISKHPEWKDFGFRFSDTQRYNSIDEFYREVENQGYKLT
FENISESYIDSVVNQGKLYLFQIYNKDFSAYSKGRPNLHTLYWKALFDERN
LQDVVYKLNGEAELFYRKQSIPKKITHPAKEAIANKNKDNPKKESVFEYDL
IKDKRFTEDKFFFHCPITINFKSSCANKFNDEINLLLKEKANDVHILSI [symbol] R
CERHLAYYTLVDGKGNIIKQDTFNIIGNDRMKTNYHDKLAAIEKDRDSARK
DWKKINNIKEMKEGYLSQVVHEIAKLVIEYNAIVVF [symbol] DLNFGFKRGRFKVE
KQVYQKLEKMLIEKLNYLVFKDNEFDKTGGVLRAYQLTAPFETFKKMGKQT
GIIYYVPAGFTSKICPVTGFVNQLYPKYESVSKSQEFFSKFDKICYNLDKG
YFEFSFDYKNFGDKAAKGKWTIASFGSRLINFRNSDKNHNWDTREVYPTKE
LEKLLKDYSIEYGHGECIKAAICGESDKKFFAKLTSVLNTILQMRNSKTGT
ELDYLISPVADVNGNFFDSRQAPKNMPQDA [symbol] ANGAYHIGLKGLMLLGRIKN
NQEGKKLNLVIKNEEYFEFVQNRNN.

[0306] The amino acid sequence of Francisella novicida Cpf1 D917A/D1255A follows. (A917, E1006, and A1255 are bolded and underlined).

MSIYQEFVNKYSLSKTLRFELIPQGKTLENIKARGLILDDEKRAKDYKKAK
QIIDKYHQFFIEEILSSVCISEDLLQNYSDVYFKLKKSDDDNLQKDFKSAK
DTIKKQISEYIKDSEKFKNLFNQNLIDAKKGQESDLILWLKQSKDNGIELF
KANSDITDIDEALEIIKSFKGWTTYFKGFHENRKNVYSSNDIPTSIIYRIV
DDNLPKFLENKAKYESLKDKAPEAINYEQIKKDLAEELTFDIDYKTSEVNQ
RVFSLDEVFEIANFNNYLNQSGITKFNTIIGGKFVNGENTKRKGINEYINL
YSQQINDKTLKKYKMSVLFKQILSDTESKSFVIDKLEDDSDVVTTMQSFYE
QIAAFKTVEEKSIKETLSLLFDDLKAQKLDLSKIYFKNDKSLTDLSQQVFD
DYSVIGTAVLEYITQQIAPKNLDNPSKKEQELIAKKTEKAKYLSLETIKLA
LEEFNKHRDIDKQCRFEEILANFAAIPMIFDEIAQNKDNLAQISIKYQNQG
KKDLLQASAEDDVKAIKDLLDQTNNLLHKLKIFHISQSEDKANILDKDEHF
YLVFEECYFELANIVPLYNKIRNYITQKPYSDEKFKLNFENSTLANGWDKN
KEPDNTAILFIKDDKYYLGVMNKKNNKIFDDKAIKENKGEGYKKIVYKLLP
GANKMLPKVFFSAKSIKFYNPSEDILRIRNHSTHTKNGSPQKGYEKFEFNI
EDCRKFIDFYKQSISKHPEWKDFGFRFSDTQRYNSIDEFYREVENQGYKLT
FENISESYIDSVVNQGKLYLFQIYNKDFSAYSKGRPNLHTLYWKALFDERN
LQDVVYKLNGEAELFYRKQSIPKKITHPAKEAIANKNKDNPKKESVFEYDL
IKDKRFTEDKFFFHCPITINFKSSGANKFNDEINLLLKEKANDVHILSI [symbol] R
GERHLAYYTLVDGKGNIIKQDTFNIIGNDRMKTNYHDKLAAIEKDRDSARK
DWKKINNIKEMKEGYLSQVVHEIAKLVIEYNAIVVF [symbol] DLNFGFKRGRFKVE
KQVYQKLEKMLIEKLNYLVFKDNEFDKTGGVLRAYQLTAPFETFKKMGKQT
GIIYYVPAGFTSKICPVTGFVNQLYPKYESVSKSQEFFSKFDKICYNLDKG
YFEFSFDYKNFGDKAAKGKWTIASFGSRLINFRNSDKNHNWDTREVYPTKE
LEKLLKDYSIEYGHGECIKAAICGESDKKFFAKLTSVLNTILQMRNSKTGT
ELDYLISPVADVNGNFFDSRQAPKNMPQDA [symbol] NGAYHIGLKGLMLLGRIKNN
QEGKKLNLVIKNEEYFEFVQNRNN.

[0307] The amino acid sequence of Francisella novicida Cpf1 E1006A/D1255A follows. (D917, A1006, and A1255 are bolded and underlined).

MSIYQEFVNKYSLSKTLRFELIPQGKTLENIKARGLILDDEKRAKDYKKAK
QIIDKYHQFFIEEILSSVCISEDLLQNYSDVYFKLKKSDDDNLQKDFKSAK
DTIKKQISEYIKDSEKFKNLFNQNLIDAKKGQESDLILWLKQSKDNGIELF
KANSDITDIDEALEIIKSFKGWTTYFKGFHENRKNVYSSNDIPTSIIYRIV
DDNLPKFLENKAKYESLKDKAPEAINYEQIKKDLAEELTFDIDYKTSEVNQ
RVFSLDEVFEIANFNNYLNQSGITKFNTIIGGKFVNGENTKRKGINEYINL
YSQQINDKTLKKYKMSVLFKQILSDTESKSFVIDKLEDDSDVVTTMQSFYE
QIAAFKTVEEKSIKETLSLLFDDLKAQKLDLSKIYFKNDKSLTDLSQQVFD
DYSVIGTAVLEYITQQIAPKNLDNPSKKEQELIAKKTEKAKYLSLETIKLA
LEEFNKHRDIDKQCRFEEILANFAAIPMIFDEIAQNKDNLAQISIKYQNQG
KKDLLQASAEDDVKAIKDLLDQTNNLLHKLKIFHISQSEDKANILDKDEHF
YLVFEECYFELANIVPLYNKIRNYITQKPYSDEKFKLNFENSTLANGWDKN
KEPDNTAILFIKDDKYYLGVMNKKNNKIFDDKAIKENKGEGYKKIVYKLLP
GANKMLPKVFFSAKSIKFYNPSEDILRIRNHSTHTKNGSPQKGYEKFEFNI
EDCRKFIDFYKQSISKHPEWKDFGFRFSDTQRYNSIDEFYREVENQGYKLT
FENISESYIDSVVNQGKLYLFQIYNKDFSAYSKGRPNLHTLYWKALFDERN
LQDVVYKLNGEAELFYRKQSIPKKITHPAKEAIANKNKDNPKKESVFEYDL
IKDKRFTEDKFFFHCPITINFKSSGANKFNDEINLLLKEKANDVHILSI [symbol] R
GERHLAYYTLVDGKGNIIKQDTFNIIGNDRMKTNYHDKLAAIEKDRDSARK
DWKKINNIKEMKEGYLSQVVHEIAKLVIEYNAIVVF [symbol] DLNFGFKRGRFKVE
KQVYQKLEKMLIEKLNYLVFKDNEFDKTGGVLRAYQLTAPFETFKKMGKQT
GIIYYVPAGFTSKICPVTGFVNQLYPKYESVSKSQEFFSKFDKICYNLDKG
YFEFSFDYKNFGDKAAKGKWTIASFGSRLINFRNSDKNHNWDTREVYPTKE
LEKLLKDYSIEYGHGECIKAAICGESDKKFFAKLTSVLNTILQMRNSKTGT
ELDYLISPVADVNGNFFDSRQAPKNMPQDA [symbol] NGAYHIGLKGLMLLGRIKNN
QEGKKLNLVIKNEEYFEFVQNRNN.

[0308] The amino acid sequence of Francisella novicida Cpf1 D917A/E1006A/D1255A follows. (A917, A1006, and A1255 are bolded and underlined).

MSIYQEFVNKYSLSKTLRFELIPQGKTLENIKARGLILDDEKRAKDYKKAK
QIIDKYHQFFIEEILSSVCISEDLLQNYSDVYFKLKKSDDDNLQKDFKSAK
DTIKKQISEYIKDSEKFKNLFNQNLIDAKKGQESDLILWLKQSKDNGIELF
KANSDITDIDEALEIIKSFKGWTTYFKGFHENRKNVYSSNDIPTSIIYRIV
DDNLPKFLENKAKYESLKDKAPEAINYEQIKKDLAEELTFDIDYKTSEVNQ
RVFSLDEVFEIANFNNYLNQSGITKFNTIIGGKFVNGENTKRKGINEYINL
YSQQINDKTLKKYKMSVLFKQILSDTESKSFVIDKLEDDSDVVTTMQSFYE
QIAAFKTVEEKSIKETLSLLFDDLKAQKLDLSKIYFKNDKSLTDLSQQVFD
DYSVIGTAVLEYITQQIAPKNLDNPSKKEQELIAKKTEKAKYLSLETIKLA
LEEFNKHRDIDKQCRFEEILANFAAIPMIFDEIAQNKDNLAQISIKYQNQG
KKDLLQASAEDDVKAIKDLLDQTNNLLHKLKIFHISQSEDKANILDKDEHF
YLVFEECYFELANIVPLYNKIRNYITQKPYSDEKFKLNFENSTLANGWDKN
KEPDNTAILFIKDDKYYLGVMNKKNNKIFDDKAIKENKGEGYKKIVYKLLP
GANKMLPKVFFSAKSIKFYNPSEDILRIRNHSTHTKNCSPQKCYEKFEFNI
EDCRKFIDFYKQSISKHPEWKDFCFRFSDTQRYNSIDEFYREVENQGYKLT
FENISESYIDSVVNQGKLYLFQIYNKDFSAYSKGRPNLHTLYWKALFDERN
LQDVVYKLNGEAELFYRKQSIPKKITHPAKEAIANKNKDNPKKESVFEYDL
IKDKRFTEDKFFFHCPITINFKSSGANKFNDEINLLLKEKANDVHILSI [symbol] R
GERHLAYYTLVDGKGNIIKQDTFNIIGNDRMKTNYHDKLAAIEKDRDSARK
DWKKINNIKEMKEGYLSQVVHEIAKLVIEYNAIVVF [symbol] DLNFGFKRGRFKVE
KQVYQKLEKMLIEKLNYLVFKDNEFDKTGGVLRAYQLTAPFETFKKMGKQT
GIIYYVPAGFTSKICPVTGFVNQLYPKYESVSKSQEFFSKFDKICYNLDKG
YFEFSFDYKNFGDKAAKGKWTIASFGSRLINFRNSDKNHNWDTREVYPTKE
LEKLLKDYSIEYGHGECIKAAICGESDKKFFAKLTSVLNTILQMRNSKTGT
ELDYLISPVADVNGNFFDSRQAPKNMPQDA [symbol] ANGAYHIGLKGLMLLGRIKN
NQEGKKLNLVIKNEEYFEFVQNRNN.

[0309] In some embodiments, one of the Cas9 domains present in the fusion protein may be replaced with a guide nucleotide sequence-programmable DNA-binding protein domain that has no requirements for a PAM sequence.

[0310] In some embodiments, the Cas domain is a Cas9 domain from Staphylococcus aureus (SaCas9). In some embodiments, the SaCas9 domain is a nuclease active SaCas9, a nuclease inactive SaCas9 (SaCas9d), or a SaCas9 nickase (SaCas9n). In some embodiments, the SaCas9 domain comprises a N579A mutation, or a corresponding mutation in any of the amino acid sequences provided herein.

[0311] In some embodiments, the SaCas9 domain, the SaCas9d domain, or the SaCas9n domain can bind to a nucleic acid sequence having a non-canonical PAM. In some embodiments, the SaCas9 domain, the SaCas9d domain, or the SaCas9n domain can bind to a nucleic acid sequence having a NNGRRT or a NNGRRT PAM sequence. In some embodiments, the SaCas9 domain comprises one or more of a E781X, a N967X, and a R1014X mutation, or a corresponding mutation in any of the amino acid sequences provided herein, wherein X is any amino acid. In some embodiments, the SaCas9 domain comprises one or more of a E781K, a N967K, and a R1014H mutation, or one or more corresponding mutation in any of the amino acid sequences provided herein. In some embodiments, the SaCas9 domain comprises a E781K, a N967K, or a R1014H mutation, or corresponding mutations in any of the amino acid sequences provided herein.

[0312] The amino acid sequence of an exemplary SaCas9 is as follows:

MKRNYILGLDIGITSVGYGIIDYETRDVIDAGVRLFKEANVENNEGRRSKR
GARRLKRRRRHRIQRVKKLLFDYNLLTDHSELSGINPYEARVKGLSQKLSE
EEFSAALLHLAKRRGVHNVNEVEEDTGNELSTKEQISRNSKALEEKYVAEL
QLERLKKDGEVRGSINRFKTSDYVKEAKQLLKVQKAYHQLDQSFIDTYIDL
LETRRTYYEGPGEGSPFGWKDIKEWYEMLMGHCTYFPEELRSVKYAYNADL
YNALNDLNNLVITRDENEKLEYYEKFQIIENVFKQKKKPTLKQIAKEILVN
EEDIKGYRVTSTGKPEFTNLKVYHDIKDITARKEIIENAELLDQIAKILTI
YQSSEDIQEELTNLNSELTQEEIEQISNLKGYTGTHNLSLKAINLILDELW
HTNDNQIAIFNRLKLVPKKVDLSQQKEIPTTLVDDFILSPVVKRSFIQSIK
VINAIIKKYGLPNDIIIELAREKNSKDAQKMINEMQKRNRQTNERIEEIIR
TTGKENAKYLIEKIKLHDMQEGKCLYSLEAIPLEDLLNNPFNYEVDHIIPR
SVSFDNSFNNKVLVKQEE [symbol] SKKGNRTPFQYLSSSDSKISYETFKKHILNLA
KGKGRISKTKKEYLLEERDINRFSVQKDFINRNLVDTRYATRGLMNLLRSY
FRVNNLDVKVKSINGGFTSFLRRKWKFKKERNKGYKHHAEDALIIANADFI
FKEWKKLDKAKKVMENQMFEEKQAESMPEIETEQEYKEIFITPHQIKHIKD
FKDYKYSHRVDKKPNRELINDTLYSTRKDDKGNTLIVNNLNGLYDKDNDKL
KKLINKSPEKLLMYHHDPQTYQKLKLIMEQYGDEKNPLYKYYEETGNYLTK
YSKKDNGPVIKKIKYYGNKLNAHLDITDDYPNSRNKVVKLSLKPYRFDVYL
DNGVYKFVTVKNLDVIKKENYYEVNSKCYEEAKKLKKISNQAEFIASFYNN
DLIKINGELYRVIGVNNDLLNRIEVNMIDITYREYLENMNDKRPPRIIKTI
ASKTQSIKKYSTDILGNLYEVKSKKHPQIIKKG.

In this sequence, residue N579, which is underlined and in bold, may be mutated (e.g., to a A579) to yield a SaCas9 nickase.

[0313] The amino acid sequence of an exemplary SaCas9n is as follows:

KRNYILGLDIGITSVGYGIIDYETRDVIDAGVRLFKEANVENNEGRRSKRG
ARRLKRRRRHRIQRVKKLLFDYNLLTDHSELSGINPYEARVKGLSQKLSEE
EFSAALLHLAKRRGVHNVNEVEEDTGNELSTKEQISRNSKALEEKYVAELQ
LERLKKDGEVRGSINRFKTSDYVKEAKQLLKVQKAYHQLDQSFIDTYIDLL
ETRRTYYEGPGEGSPFGWKDIKEWYEMLMGHCTYFPEELRSVKYAYNADLY
NALNDLNNLVITRDENEKLEYYEKFQIIENVFKQKKKPTLKQIAKEILVNE
EDIKGYRVTSTGKPEFTNLKVYHDIKDITARKEIIENAELLDQIAKILTIY
QSSEDIQEELTNLNSELTQEEIEQISNLKGYTGTHNLSLKAINLILDELWH
TNDNQIAIFNRLKLVPKKVDLSQQKEIPTTLVDDFILSPVVKRSFIQSIKV
INAIIKKYGLPNDIIIELAREKNSKDAQKMINEMQKRNRQTNERIEEIIRT
TGKENAKYLIEKIKLHDMQEGKCLYSLEAIPLEDLLNNPFNYEVDHIIPRS
VSFDNSFNNKVLVKQEE [symbol] SKKGNRTPFQYLSSSDSKISYETFKKHILNLAK
GKGRISKTKKEYLLEERDINRFSVQKDFINRNLVDTRYATRGLMNLLRSYF
RVNNLDVKVKSINGGFTSFLRRKWKFKKERNKGYKHHAEDALIIANADFIF
KEWKKLDKAKKVMENQMFEEKQAESMPEIETEQEYKEIFITPHQIKHIKDF
KDYKYSHRVDKKPNRELINDTLYSTRKDDKGNTLIVNNLNGLYDKDNDKLK
KLINKSPEKLLMYHHDPQTYQKLKLIMEQYGDEKNPLYKYYEETGNYLTKY
SKKDNGPVIKKIKYYGNKLNAHLDITDDYPNSRNKVVKLSLKPYRFDVYLD
NGVYKFVTVKNLDVIKKENYYEVNSKCYEEAKKLKKISNQAEFIASFYNND
LIKINGELYRVIGVNNDLLNRIEVNMIDITYREYLENMNDKRPPRIIKTIA
SKTQSIKKYSTDILGNLYEVKSKKHPQIIKKG.

[0314] In this sequence, residue A579, which can be mutated from N579 to yield a SaCas9 nickase, is underlined and in bold.

[0315] The amino acid sequences of an exemplary SaKKH Cas9 is as follows:

KRNYILGLDIGITSVGYGIIDYETRDVIDAGVRLFKEANVENNEGRRSKRG
ARRLKRRRRHRIQRVKKLLFDYNLLTDHSELSGINPYEARVKGLSQKLSEE
EFSAALLHLAKRRGVHNVNEVEEDTGNELSTKEQISRNSKALEEKYVAELQ
LERLKKDGEVRGSINRFKTSDYVKEAKQLLKVQKAYHQLDQSFIDTYIDLL
ETRRTYYEGPGEGSPFGWKDIKEWYEMLMGHCTYFPEELRSVKYAYNADLY
NALNDLNNLVITRDENEKLEYYEKFQIIENVFKQKKKPTLKQIAKEILVNE
EDIKGYRVTSTGKPEFTNLKVYHDIKDITARKEIIENAELLDQIAKILTIY
QSSEDIQEELTNLNSELTQEEIEQISNLKGYTGTHNLSLKAINLILDELWH
TNDNQIAIFNRLKLVPKKVDLSQQKEIPTTLVDDFILSPVVKRSFIQSIKV
INAIIKKYGLPNDIIIELAREKNSKDAQKMINEMQKRNRQTNERIEEIIRT
TGKENAKYLIEKIKLHDMQEGKCLYSLEAIPLEDLLNNPFNYEVDHIIPRS
VSFDNSFNNKVLVKQEE [symbol] SKKGNRTPFQYLSSSDSKISYETFKKHILNLAK
GKGRISKTKKEYLLEERDINRFSVQKDFINRNLVDTRYATRGLMNLLRSYF
RVNNLDVKVKSINGGFTSFLRRKWKFKKERNKGYKHHAEDALIIANADFIF
KEWKKLDKAKKVMENQMFEEKQAESMPEIETEQEYKEIFITPHQIKHIKDF
KDYKYSHRVDKKPNRKLINDTLYSTRKDDKGNTLIVNNLNGLYDKDNDKLK
KLINKSPEKLLMYHHDPQTYQKLKLIMEQYGDEKNPLYKYYEETGNYLTKY
SKKDNGPVIKKIKYYGNKLNAHLDITDDYPNSRNKVVKLSLKPYRFDVYLD
NGVYKFVTVKNLDVIKKENYYEVNSKCYEEAKKLKKISNQAEFIASFYKND
LIKINGELYRVIGVNNDLLNRIEVNMIDITYREYLENMNDKRPPHIIKTIA
SKTQSIKKYSTDILGNLYEVKSKKHPQIIKKG.

[0316] Residue A579 above, which can be mutated from N579 to yield a SaCas9 nickase, is underlined and in bold. Residues K781, K967, and H1014 above, which can be mutated from E781, N967, and R1014 to yield a SaKKH Cas9 are underlined and in italics.

### High Fidelity Cas9 Domains

[0317] Some aspects of the disclosure provide high fidelity Cas9 domains. In some embodiments, high fidelity Cas9 domains are engineered Cas9 domains comprising one or more mutations that decrease electrostatic interactions between the Cas9 domain and the sugar-phosphate backbone of a DNA, relative to a corresponding wild-type Cas9 domain. High fidelity Cas9 domains that have decreased electrostatic interactions with the sugar-phosphate backbone of DNA can have less off-target effects. In some embodiments, the Cas9 domain (e.g., a wild type Cas9 domain) comprises one or more mutations that decrease the association between the Cas9 domain and the sugar-phosphate backbone of a DNA. In some embodiments, a Cas9 domain comprises one or more mutations that decreases the association between the Cas9 domain and the sugar-phosphate backbone of DNA by at least 1%, at least 2%, at least 3%, at least 4%, at least 5%, at least 10%, at least 15%, at least 20%, at least 25%, at least 30%, at least 35%, at least 40%, at least 45%, at least 50%, at least 55%, at least 60%, at least 65%, or at least 70%.

[0318] In some embodiments, any of the Cas9 fusion proteins provided herein comprise one or more of a N497X, a R661X, a Q695X, and/or a Q926X mutation, or a corresponding mutation in any of the amino acid sequences provided herein, wherein X is any amino acid. In some embodiments, any of the Cas9 fusion proteins provided herein comprise one or more of a N497A, a R661A, a Q695A, and/or a Q926A mutation, or a corresponding mutation in any of the amino acid sequences provided herein. In some embodiments, the Cas9 domain comprises a D10A mutation, or a corresponding mutation in any of the amino acid sequences provided herein. Cas9 domains with high fidelity are known in the art and would be apparent to the skilled artisan. For example, Cas9 domains with high fidelity have been described in Kleinstiver, B. P., et al. “High-fidelity CRISPR-Cas9 nucleases with no detectable genome-wide off-target effects.” Nature 529, 490-495 (2016); and Slaymaker, I. M., et al. “Rationally engineered Cas9 nucleases with improved specificity.” Science 351, 84-88 (2015); the entire contents of each are incorporated herein by reference.

[0319] In some embodiments, the modified Cas9 is a high fidelity Cas9 enzyme. In some embodiments, the high fidelity Cas9 enzyme is SpCas9 (K855A), eSpCas9 (1.1), SpCas9-HF1, or hyper accurate Cas9 variant (HypaCas9). The modified Cas9 eSpCas9 (1.1) contains alanine substitutions that weaken the interactions between the HNH/RuvC groove and the non-target DNA strand, preventing strand separation and cutting at off-target sites. Similarly, SpCas9-HF1 lowers off-target editing through alanine substitutions that disrupt Cas9's interactions with the DNA phosphate backbone. HypaCas9 contains mutations (SpCas9 N692A/M694A/Q695A/H698A) in the REC3 domain that increase Cas9 proofreading and target discrimination. All three high fidelity enzymes generate less off-target editing than wildtype Cas9.

[0320] An exemplary high fidelity Cas9 is provided below.

High Fidelity Cas9 domain mutations relative to Cas9 are shown in bold and underline

MDKKYSIGL [symbol] IGTNSVGWAVITDEYKVPSKKFKVLGNTDRHSIKKNLIGAL
LFDSGETAEATRLKRTARRRYTRRKNRICYLQEIFSNEMAKVDDSFFHRLE
ESFLVEEDKKHERHPIFGNIVDEVAYHEKYPTIYHLRKKLVDSTDKADLRL
IYLALAHMIKFRGHFLIEGDLNPDNSDVDKLFIQLVQTYNQLFEENPINAS
GVDAKAILSARLSKSRRLENLIAQLPGEKKNGLFGNLIALSLGLTPNFKSN
FDLAEDAKLQLSKDTYDDDLDNLLAQIGDQYADLFLAAKNLSDAILLSDIL
RVNTEITKAPLSASMIKRYDEHHQDLTLLKALVRQQLPEKYKEIFFDQSKN
GYAGYIDGGASQEEFYKFIKPILEKMDGTEELLVKLNREDLLRKQRTFDNG
SIPHQIHLGELHAILRRQEDFYPFLKDNREKIEKILTFRIPYYVGPLARGN
SRFAWMTRKSEETITPWNFEEVVDKGASAQSFIERMT [symbol] FDKNLPNEKVLPK
HSLLYEYFTVYNELTKVKYVTEGMRKPAFLSGEQKKAIVDLLFKTNRKVTV
KQLKEDYFKKIECFDSVEISGVEDRFNASLGTYHDLLKIIKDKDFLDNEEN
EDILEDIVLTLTLFEDREMIEERLKTYAHLFDDKVMKQLKRRRYTGWG [symbol] LS
RKLINGIRDKQSGKTILDFLKSDGFANRNFM [symbol] LIHDDSLTFKEDIQKAQVS
GQGDSLHEHIANLAGSPAIKKGILQTVKVVDELVKVMGRHKPENIVIEMAR
ENQTTQKGQKNSRERMKRIEEGIKELGSQILKEHPVENTQLQNEKLYLYYL
QNGRDMYVDQELDINRLSDYDVDHIVPQSFLKDDSIDNKVLTRSDKNRGKS
DNVPSEEVVKKMKNYWRQLLNAKLITQRKFDNLTKAERGGLSELDKAGFIK
RQLVETR [symbol] ITKHVAQILDSRMNTKYDENDKLIREVKVITLKSKLVSDFRKD
FQFYKVREINNYHHAHDAYLNAVVGTALIKKYPKLESEFVYGDYKVYDVRK
MIAKSEQEIGKATAKYFFYSNIMNFFKTEITLANGEIRKRPLIETNGETGE
IVWDKGRDFATVRKVLSMPQVNIVKKTEVQTGGFSKESILPKRNSDKLIAR
KKDWDPKKYGGFDSPTVAYSVLVVAKVEKGKSKKLKSVKELLGITIMERSS
FEKNPIDFLEAKGYKEVKKDLIIKLPKYSLFELENGRKRMLASAGELQKGN
ELALPSKYVNFLYLASHYEKLKGSPEDNEQKQLFVEQHKHYLDEIIEQISE
FSKRVILADANLDKVLSAYNKHRDKPIREQAENIIHLFTLTNLGAPAAFKY
FDTTIDRKRYTSTKEVLDATLIHQSITGLYETRIDLSQLGGD.

### Guide Polynucleotides

[0321] In an embodiment, the guide polynucleotide is a guide RNA. An RNA/Cas complex can assist in “guiding” Cas protein to a target DNA. Cas9/crRNA/tracrRNA endonucleolytically cleaves linear or circular dsDNA target complementary to the spacer. The target strand not complementary to crRNA is first cut endonucleolytically, then trimmed 3′-5′ exonucleolytically. In nature, DNA-binding and cleavage typically requires protein and both RNAs. However, single guide RNAs (“sgRNA”, or simply “gNRA”) can be engineered so as to incorporate aspects of both the crRNA and tracrRNA into a single RNA species. See, e.g., Jinek M. et al., Science 337:816-821(2012), the entire contents of which is hereby incorporated by reference. Cas9 recognizes a short motif in the CRISPR repeat sequences (the PAM or protospacer adjacent motif) to help distinguish self versus non-self. Cas9 nuclease sequences and structures are well known to those of skill in the art (see e.g., “Complete genome sequence of an M1 strain of Streptococcus pyogenes.” Ferretti, J. J. et al., Natl. Acad. Sci. U.S.A. 98:4658-4663(2001); “CRISPR RNA maturation by trans-encoded small RNA and host factor RNase III.” Deltcheva E. et al., Nature 471:602-607(2011); and “Programmable dual-RNA-guided DNA endonuclease in adaptive bacterial immunity.” Jinek M. et al, Science 337:816-821(2012), the entire contents of each of which are incorporated herein by reference). Cas9 orthologs have been described in various species, including, but not limited to, S. pyogenes and S. thermophilus. Additional suitable Cas9 nucleases and sequences can be apparent to those of skill in the art based on this disclosure, and such Cas9 nucleases and sequences include Cas9 sequences from the organisms and loci disclosed in Chylinski, Rhun, and Charpentier, “The tracrRNA and Cas9 families of type II CRISPR-Cas immunity systems” (2013) RNA Biology 10:5, 726-737; the entire contents of which are incorporated herein by reference. In some embodiments, a Cas9 nuclease has an inactive (e.g., an inactivated) DNA cleavage domain, that is, the Cas9 is a nickase.

[0322] In some embodiments, the guide polynucleotide is at least one single guide RNA (“sgRNA” or “gNRA”). In some embodiments, the guide polynucleotide is at least one tracrRNA. In some embodiments, the guide polynucleotide does not require PAM sequence to guide the polynucleotide-programmable DNA-binding domain (e.g., Cas9 or Cpf1) to the target nucleotide sequence.

[0323] The polynucleotide programmable nucleotide binding domain (e.g., a CRISPR-derived domain) of the base editors disclosed herein can recognize a target polynucleotide sequence by associating with a guide polynucleotide. A guide polynucleotide (e.g., gRNA) is typically single-stranded and can be programmed to site-specifically bind (i.e., via complementary base pairing) to a target sequence of a polynucleotide, thereby directing a base editor that is in conjunction with the guide nucleic acid to the target sequence. A guide polynucleotide can be DNA. A guide polynucleotide can be RNA. In some cases, the guide polynucleotide comprises natural nucleotides (e.g., adenosine). In some cases, the guide polynucleotide comprises non-natural (or unnatural) nucleotides (e.g., peptide nucleic acid or nucleotide analogs). In some cases, the targeting region of a guide nucleic acid sequence can be at least 15, 16, 17, 18, 19, 20, 21, 22, 23, 24, 25, 26, 27, 28, 29, or 30 nucleotides in length. A targeting region of a guide nucleic acid can be between 10-30 nucleotides in length, or between 15-25 nucleotides in length, or between 15-20 nucleotides in length.

[0324] In some embodiments, a guide polynucleotide comprises two or more individual polynucleotides, which can interact with one another via for example complementary base pairing (e.g., a dual guide polynucleotide). For example, a guide polynucleotide can comprise a CRISPR RNA (crRNA) and a trans-activating CRISPR RNA (tracrRNA). For example, a guide polynucleotide can comprise one or more trans-activating CRISPR RNA (tracrRNA).

[0325] In type II CRISPR systems, targeting of a nucleic acid by a CRISPR protein (e.g., Cas9) typically requires complementary base pairing between a first RNA molecule (crRNA) comprising a sequence that recognizes the target sequence and a second RNA molecule (trRNA) comprising repeat sequences which forms a scaffold region that stabilizes the guide RNA-CRISPR protein complex. Such dual guide RNA systems can be employed as a guide polynucleotide to direct the base editors disclosed herein to a target polynucleotide sequence.

[0326] In some embodiments, the base editor provided herein utilizes a single guide polynucleotide (e.g., gRNA). In some embodiments, the base editor provided herein utilizes a dual guide polynucleotide (e.g., dual gRNAs). In some embodiments, the base editor provided herein utilizes one or more guide polynucleotide (e.g., multiple gRNA). In some embodiments, a single guide polynucleotide is utilized for different base editors described herein. For example, a single guide polynucleotide can be utilized for a cytidine base editor and an adenosine base editor.

[0327] In other embodiments, a guide polynucleotide can comprise both the polynucleotide targeting portion of the nucleic acid and the scaffold portion of the nucleic acid in a single molecule (i.e., a single-molecule guide nucleic acid). For example, a single-molecule guide polynucleotide can be a single guide RNA (sgRNA or gRNA). Herein the term guide polynucleotide sequence contemplates any single, dual, or multi-molecule nucleic acid capable of interacting with and directing a base editor to a target polynucleotide sequence.

[0328] Typically, a guide polynucleotide (e.g., crRNA/trRNA complex or a gRNA) comprises a “polynucleotide-targeting segment” that includes a sequence capable of recognizing and binding to a target polynucleotide sequence, and a “protein-binding segment” that stabilizes the guide polynucleotide within a polynucleotide programmable nucleotide binding domain component of a base editor. In some embodiments, the polynucleotide targeting segment of the guide polynucleotide recognizes and binds to a DNA polynucleotide, thereby facilitating the editing of a base in DNA. In other cases, the polynucleotide targeting segment of the guide polynucleotide recognizes and binds to an RNA polynucleotide, thereby facilitating the editing of a base in RNA. Herein a “segment” refers to a section or region of a molecule, e.g., a contiguous stretch of nucleotides in the guide polynucleotide. A segment can also refer to a region/section of a complex such that a segment can comprise regions of more than one molecule. For example, where a guide polynucleotide comprises multiple nucleic acid molecules, the protein-binding segment of can include all or a portion of multiple separate molecules that are for instance hybridized along a region of complementarity. In some embodiments, a protein-binding segment of a DNA-targeting RNA that comprises two separate molecules can comprise (i) base pairs 40-75 of a first RNA molecule that is 100 base pairs in length; and (ii) base pairs 10-25 of a second RNA molecule that is 50 base pairs in length. The definition of “segment,” unless otherwise specifically defined in a particular context, is not limited to a specific number of total base pairs, is not limited to any particular number of base pairs from a given RNA molecule, is not limited to a particular number of separate molecules within a complex, and can include regions of RNA molecules that are of any total length and can include regions with complementarity to other molecules.

[0329] A guide RNA or a guide polynucleotide can comprise two or more RNAs, e.g., CRISPR RNA (crRNA) and transactivating crRNA (tracrRNA). A guide RNA or a guide polynucleotide can sometimes comprise a single-chain RNA, or single guide RNA (sgRNA) formed by fusion of a portion (e.g., a functional portion) of crRNA and tracrRNA. A guide RNA or a guide polynucleotide can also be a dual RNA comprising a crRNA and a tracrRNA. Furthermore, a crRNA can hybridize with a target DNA.

[0330] As discussed above, a guide RNA or a guide polynucleotide can be an expression product. For example, a DNA that encodes a guide RNA can be a vector comprising a sequence coding for the guide RNA. A guide RNA or a guide polynucleotide can be transferred into a cell by transfecting the cell with an isolated guide RNA or plasmid DNA comprising a sequence coding for the guide RNA and a promoter. A guide RNA or a guide polynucleotide can also be transferred into a cell in other way, such as using virus-mediated gene delivery.

[0331] A guide RNA or a guide polynucleotide can be isolated. For example, a guide RNA can be transfected in the form of an isolated RNA into a cell or organism. A guide RNA can be prepared by in vitro transcription using any in vitro transcription system known in the art. A guide RNA can be transferred to a cell in the form of isolated RNA rather than in the form of plasmid comprising encoding sequence for a guide RNA.

[0332] A guide RNA or a guide polynucleotide can comprise three regions: a first region at the 5′ end that can be complementary to a target site in a chromosomal sequence, a second internal region that can form a stem loop structure, and a third 3′ region that can be single-stranded. A first region of each guide RNA can also be different such that each guide RNA guides a fusion protein to a specific target site. Further, second and third regions of each guide RNA can be identical in all guide RNAs.

[0333] A first region of a guide RNA or a guide polynucleotide can be complementary to sequence at a target site in a chromosomal sequence such that the first region of the guide RNA can base pair with the target site. In some cases, a first region of a guide RNA can comprise from or from about 10 nucleotides to 25 nucleotides (i.e., from 10 nucleotides to nucleotides; or from about 10 nucleotides to about 25 nucleotides; or from 10 nucleotides to about 25 nucleotides; or from about 10 nucleotides to 25 nucleotides) or more. For example, a region of base pairing between a first region of a guide RNA and a target site in a chromosomal sequence can be or can be about 10, 11, 12, 13, 14, 15, 16, 17, 18, 19, 20, 22, 23, 24, 25, or more nucleotides in length. Sometimes, a first region of a guide RNA can be or can be about 19, 20, or 21 nucleotides in length.

[0334] A guide RNA or a guide polynucleotide can also comprise a second region that forms a secondary structure. For example, a secondary structure formed by a guide RNA can comprise a stem (or hairpin) and a loop. A length of a loop and a stem can vary. For example, a loop can range from or from about 3 to 10 nucleotides in length, and a stem can range from or from about 6 to 20 base pairs in length. A stem can comprise one or more bulges of 1 to 10 or about 10 nucleotides. The overall length of a second region can range from or from about 16 to 60 nucleotides in length. For example, a loop can be or can be about 4 nucleotides in length and a stem can be or can be about 12 base pairs.

[0335] A guide RNA or a guide polynucleotide can also comprise a third region at the 3′ end that can be essentially single-stranded. For example, a third region is sometimes not complementarity to any chromosomal sequence in a cell of interest and is sometimes not complementarity to the rest of a guide RNA. Further, the length of a third region can vary. A third region can be more than or more than about 4 nucleotides in length. For example, the length of a third region can range from or from about 5 to 60 nucleotides in length.

[0336] A guide RNA or a guide polynucleotide can target any exon or intron of a gene target. In some cases, a guide can target exon 1 or 2 of a gene, in other cases; a guide can target exon 3 or 4 of a gene. A composition can comprise multiple guide RNAs that all target the same exon or in some cases, multiple guide RNAs that can target different exons. An exon and an intron of a gene can be targeted.

[0337] A guide RNA or a guide polynucleotide can target a nucleic acid sequence of or of about 20 nucleotides. A target nucleic acid can be less than or less than about 20 nucleotides. A target nucleic acid can be at least or at least about 5, 10, 15, 16, 17, 18, 19, 20, 21, 22, 23, 24, 25, 30, or anywhere between 1-100 nucleotides in length. A target nucleic acid can be at most or at most about 5, 10, 15, 16, 17, 18, 19, 20, 21, 22, 23, 24, 25, 30, 40, 50, or anywhere between 1-100 nucleotides in length. A target nucleic acid sequence can be or can be about 20 bases immediately 5′ of the first nucleotide of the PAM. A guide RNA can target a nucleic acid sequence. A target nucleic acid can be at least or at least about 1-10, 1-20, 1-30, 1-40, 1-50, 1-60, 1-70, 1-80, 1-90, or 1-100 nucleotides.

[0338] A guide polynucleotide, for example, a guide RNA, can refer to a nucleic acid that can hybridize to another nucleic acid, for example, the target nucleic acid or protospacer in a genome of a cell. A guide polynucleotide can be RNA. A guide polynucleotide can be DNA. The guide polynucleotide can be programmed or designed to bind to a sequence of nucleic acid site-specifically. A guide polynucleotide can comprise a polynucleotide chain and can be called a single guide polynucleotide. A guide polynucleotide can comprise two polynucleotide chains and can be called a double guide polynucleotide. A guide RNA can be introduced into a cell or embryo as an RNA molecule. For example, a RNA molecule can be transcribed in vitro and/or can be chemically synthesized. An RNA can be transcribed from a synthetic DNA molecule, e.g., a gBlocks® gene fragment. A guide RNA can then be introduced into a cell or embryo as an RNA molecule. A guide RNA can also be introduced into a cell or embryo in the form of a non-RNA nucleic acid molecule, e.g., DNA molecule. For example, a DNA encoding a guide RNA can be operably linked to promoter control sequence for expression of the guide RNA in a cell or embryo of interest. A RNA coding sequence can be operably linked to a promoter sequence that is recognized by RNA polymerase III (Pol III). Plasmid vectors that can be used to express guide RNA include, but are not limited to, px330 vectors and px333 vectors. In some cases, a plasmid vector (e.g., px333 vector) can comprise at least two guide RNA-encoding DNA sequences.

[0339] Methods for selecting, designing, and validating guide polynucleotides, e.g., guide RNAs and targeting sequences are described herein and known to those skilled in the art. For example, to minimize the impact of potential substrate promiscuity of a deaminase domain in the nucleobase editor system (e.g., an AID domain), the number of residues that could unintentionally be targeted for deamination (e.g., off-target C residues that could potentially reside on ssDNA within the target nucleic acid locus) may be minimized. In addition, software tools can be used to optimize the gRNAs corresponding to a target nucleic acid sequence, e.g., to minimize total off-target activity across the genome. For example, for each possible targeting domain choice using S. pyogenes Cas9, all off-target sequences (preceding selected PAMs, e.g., NAG or NGG) may be identified across the genome that contain up to certain number (e.g., 1, 2, 3, 4, 5, 6, 7, 8, 9, or 10) of mismatched base-pairs. First regions of gRNAs complementary to a target site can be identified, and all first regions (e.g., crRNAs) can be ranked according to its total predicted off-target score; the top-ranked targeting domains represent those that are likely to have the greatest on-target and the least off-target activity. Candidate targeting gRNAs can be functionally evaluated by using methods known in the art and/or as set forth herein.

[0340] As a non-limiting example, target DNA hybridizing sequences in crRNAs of a guide RNA for use with Cas9s may be identified using a DNA sequence searching algorithm. gRNA design may be carried out using custom gRNA design software based on the public tool cas-offinder as described in Bae S., Park J., & Kim J.-S. Cas-OFFinder: A fast and versatile algorithm that searches for potential off-target sites of Cas9 RNA-guided endonucleases. Bioinformatics 30, 1473-1475 (2014). This software scores guides after calculating their genome-wide off-target propensity. Typically matches ranging from perfect matches to 7 mismatches are considered for guides ranging in length from 17 to 24. Once the off-target sites are computationally-determined, an aggregate score is calculated for each guide and summarized in a tabular output using a web-interface. In addition to identifying potential target sites adjacent to PAM sequences, the software also identifies all PAM adjacent sequences that differ by 1, 2, 3 or more than 3 nucleotides from the selected target sites. Genomic DNA sequences for a target nucleic acid sequence, e.g., a target gene may be obtained and repeat elements may be screened using publically available tools, for example, the RepeatMasker program. RepeatMasker searches input DNA sequences for repeated elements and regions of low complexity. The output is a detailed annotation of the repeats present in a given query sequence.

[0341] Following identification, first regions of guide RNAs, e.g., crRNAs, may be ranked into tiers based on their distance to the target site, their orthogonality and presence of 5′ nucleotides for close matches with relevant PAM sequences (for example, a 5′ G based on identification of close matches in the human genome containing a relevant PAM e.g., NGG PAM for S. pyogenes, NNGRRT or NNGRRV PAM for S. aureus). As used herein, orthogonality refers to the number of sequences in the human genome that contain a minimum number of mismatches to the target sequence. A “high level of orthogonality” or “good orthogonality” may, for example, refer to 20-mer targeting domains that have no identical sequences in the human genome besides the intended target, nor any sequences that contain one or two mismatches in the target sequence. Targeting domains with good orthogonality may be selected to minimize off-target DNA cleavage.

[0342] In some embodiments, a reporter system may be used for detecting base-editing activity and testing candidate guide polynucleotides. In some embodiments, a reporter system may comprise a reporter gene based assay where base editing activity leads to expression of the reporter gene. For example, a reporter system may include a reporter gene comprising a deactivated start codon, e.g., a mutation on the template strand from 3′-TAC-5′ to 3′-CAC-5′. Upon successful deamination of the target C, the corresponding mRNA will be transcribed as 5′-AUG-3′ instead of 5′-GUG-3′, enabling the translation of the reporter gene. Suitable reporter genes will be apparent to those of skill in the art. Non-limiting examples of reporter genes include gene encoding green fluorescence protein (GFP), red fluorescence protein (RFP), luciferase, secreted alkaline phosphatase (SEAP), or any other gene whose expression are detectable and apparent to those skilled in the art. The reporter system can be used to test many different gRNAs, e.g., in order to determine which residue(s) with respect to the target DNA sequence the respective deaminase will target. sgRNAs that target non-template strand can also be tested in order to assess off-target effects of a specific base editing protein, e.g., a Cas9 deaminase fusion protein. In some embodiments, such gRNAs can be designed such that the mutated start codon will not be base-paired with the gRNA. The guide polynucleotides can comprise standard ribonucleotides, modified ribonucleotides (e.g., pseudouridine), ribonucleotide isomers, and/or ribonucleotide analogs. In some embodiments, the guide polynucleotide can comprise at least one detectable label. The detectable label can be a fluorophore (e.g., FAM, TMR, Cy3, Cy5, Texas Red, Oregon Green, Alexa Fluors, Halo tags, or suitable fluorescent dye), a detection tag (e.g., biotin, digoxigenin, and the like), quantum dots, or gold particles.

[0343] The guide polynucleotides can be synthesized chemically, synthesized enzymatically, or a combination thereof. For example, the guide RNA can be synthesized using standard phosphoramidite-based solid-phase synthesis methods. Alternatively, the guide RNA can be synthesized in vitro by operably linking DNA encoding the guide RNA to a promoter control sequence that is recognized by a phage RNA polymerase. Examples of suitable phage promoter sequences include T7, T3, SP6 promoter sequences, or variations thereof. In embodiments in which the guide RNA comprises two separate molecules (e.g., crRNA and tracrRNA), the crRNA can be chemically synthesized and the tracrRNA can be enzymatically synthesized.

[0344] In some embodiments, a base editor system may comprise multiple guide polynucleotides, e.g., gRNAs. For example, the gRNAs may target to one or more target loci (e.g., at least 1 gRNA, at least 2 gRNA, at least 5 gRNA, at least 10 gRNA, at least 20 gRNA, at least 30 g RNA, at least 50 gRNA) comprised in a base editor system. The multiple gRNA sequences can be tandemly arranged and are preferably separated by a direct repeat.

[0345] A DNA sequence encoding a guide RNA or a guide polynucleotide can also be part of a vector. Further, a vector can comprise additional expression control sequences (e.g., enhancer sequences, Kozak sequences, polyadenylation sequences, transcriptional termination sequences, etc.), selectable marker sequences (e.g., GFP or antibiotic resistance genes such as puromycin), origins of replication, and the like. A DNA molecule encoding a guide RNA (gRNA) can also be linear. A DNA molecule encoding a guide RNA (gRNA) or a guide polynucleotide can also be circular.

[0346] In some embodiments, one or more components of a base editor system may be encoded by DNA sequences. Such DNA sequences may be introduced into an expression system, e.g., a cell, together or separately. For example, DNA sequences encoding a polynucleotide programmable nucleotide binding domain and a guide RNA may be introduced into a cell, each DNA sequence can be part of a separate molecule (e.g., one vector containing the polynucleotide programmable nucleotide binding domain coding sequence and a second vector containing the guide RNA coding sequence) or both can be part of a same molecule (e.g., one vector containing coding (and regulatory) sequence for both the polynucleotide programmable nucleotide binding domain and the guide RNA).

[0347] A guide polynucleotide can comprise one or more modifications to provide a nucleic acid with a new or enhanced feature. A guide polynucleotide can comprise a nucleic acid affinity tag. A guide polynucleotide can comprise synthetic nucleotide, synthetic nucleotide analog, nucleotide derivatives, and/or modified nucleotides.

[0348] In some cases, a gRNA or a guide polynucleotide can comprise modifications. A modification can be made at any location of a gRNA or a guide polynucleotide. More than one modification can be made to a single gRNA or a guide polynucleotide. A gRNA or a guide polynucleotide can undergo quality control after a modification. In some cases, quality control can include PAGE, HPLC, MS, or any combination thereof.

[0349] A modification of a gRNA or a guide polynucleotide can be a substitution, insertion, deletion, chemical modification, physical modification, stabilization, purification, or any combination thereof.

[0350] A gRNA or a guide polynucleotide can also be modified by 5′adenylate, 5′ guanosine-triphosphate cap, 5′N7-Methylguanosine-triphosphate cap, 5′triphosphate cap, 3′phosphate, 3′thiophosphate, 5′phosphate, 5′thiophosphate, Cis-Syn thymidine dimer, trimers, C12 spacer, C3 spacer, C6 spacer, dSpacer, PC spacer, rSpacer, Spacer 18, Spacer 9,3′-3′ modifications, 5′-5′ modifications, abasic, acridine, azobenzene, biotin, biotin BB, biotin TEG, cholesteryl TEG, desthiobiotin TEG, DNP TEG, DNP-X, DOTA, dT-Biotin, dual biotin, PC biotin, psoralen C2, psoralen C6, TINA, 3′DABCYL, black hole quencher 1, black hole quencer 2, DABCYL SE, dT-DABCYL, IRDye QC-1, QSY-21, QSY-35, QSY-7, QSY-9, carboxyl linker, thiol linkers, 2′-deoxyribonucleoside analog purine, 2′-deoxyribonucleoside analog pyrimidine, ribonucleoside analog, 2′-O-methyl ribonucleoside analog, sugar modified analogs, wobble/universal bases, fluorescent dye label, 2′-fluoro RNA, 2′-O-methyl RNA, methylphosphonate, phosphodiester DNA, phosphodiester RNA, phosphothioate DNA, phosphorothioate RNA, UNA, pseudouridine-5′-triphosphate, 5′-methylcytidine-5′-triphosphate, or any combination thereof.

[0351] In some cases, a modification is permanent. In other cases, a modification is transient. In some cases, multiple modifications are made to a gRNA or a guide polynucleotide. A gRNA or a guide polynucleotide modification can alter physiochemical properties of a nucleotide, such as their conformation, polarity, hydrophobicity, chemical reactivity, base-pairing interactions, or any combination thereof.

[0352] The PAM sequence can be any PAM sequence known in the art. Suitable PAM sequences include, but are not limited to, NGG, NGA, NGC, NGN, NGT, NGCG, NGAG, NGAN, NGNG, NGCN, NGCG, NGTN, NNGRRT, NNNRRT, NNGRR(N), TTTV, TYCV, TYCV, TATV, NNNNGATT, NNAGAAW, or NAAAAC. Y is a pyrimidine; N is any nucleotide base; W is A or T.

[0353] A modification can also be a phosphorothioate substitute. In some cases, a natural phosphodiester bond can be susceptible to rapid degradation by cellular nucleases and; a modification of internucleotide linkage using phosphorothioate (PS) bond substitutes can be more stable towards hydrolysis by cellular degradation. A modification can increase stability in a gRNA or a guide polynucleotide. A modification can also enhance biological activity. In some cases, a phosphorothioate enhanced RNA gRNA can inhibit RNase A, RNase Ti, calf serum nucleases, or any combinations thereof. These properties can allow the use of PS-RNA gRNAs to be used in applications where exposure to nucleases is of high probability in vivo or in vitro. For example, phosphorothioate (PS) bonds can be introduced between the last 3-5 nucleotides at the 5′- or “-end of a gRNA which can inhibit exonuclease degradation. In some cases, phosphorothioate bonds can be added throughout an entire gRNA to reduce attack by endonucleases.

### Protospacer Adjacent Motif

[0354] The term “protospacer adjacent motif (PAM)” or PAM-like motif refers to a 2-6 base pair DNA sequence immediately following the DNA sequence targeted by the Cas9 nuclease in the CRISPR bacterial adaptive immune system. In some embodiments, the PAM can be a 5′ PAM (i.e., located upstream of the 5′ end of the protospacer). In other embodiments, the PAM can be a 3′ PAM (i.e., located downstream of the 5′ end of the protospacer).

[0355] The PAM sequence is essential for target binding, but the exact sequence depends on a type of Cas protein.

[0356] A base editor provided herein can comprise a CRISPR protein-derived domain that is capable of binding a nucleotide sequence that contains a canonical or non-canonical protospacer adjacent motif (PAM) sequence. A PAM site is a nucleotide sequence in proximity to a target polynucleotide sequence. Some aspects of the disclosure provide for base editors comprising all or a portion of CRISPR proteins that have different PAM specificities. For example, typically Cas9 proteins, such as Cas9 from S. pyogenes (spCas9), require a canonical NGG PAM sequence to bind a particular nucleic acid region, where the “N” in “NGG” is adenine (A), thymine (T), guanine (G), or cytosine (C), and the G is guanine. A PAM can be CRISPR protein-specific and can be different between different base editors comprising different CRISPR protein-derived domains. A PAM can be 5′ or 3′ of a target sequence. A PAM can be upstream or downstream of a target sequence. A PAM can be 1, 2, 3, 4, 5, 6, 7, 8, 9, 10 or more nucleotides in length. Often, a PAM is between 2-6 nucleotides in length. Several PAM variants are described in Table 1 below.

TABLE 1
Cas9 proteins and corresponding
PAM sequences

| Variant | PAM |
|---|---|
| spCas9 | NGG |
| spCas9-VRQR | NGA |
| spCas9-VRER | NGCG |
| SpCas9-MQKFRAER | NGC |
| xCas9 (sp) | NGN |
| saCas9 | NNGRRT |
| saCas9-KKH | NNNRRT |
| spCas9-MQKSER | NGCG |
| spCas9-MQKSER | NGCN |
| spCas9-LRKIQK | NGTN |
| spCas9-LRVSQK | NGTN |
| spCas9-LRVSQL | NGTN |
| SpyMacCas9 | NAA |
| Cpf1 | 5′ (TTTV) |

[0357] In some embodiments, the PAM is NGC. In some embodiments, the NGC PAM is recognized by a Cas9 variant. In some embodiments, the NGC PAM variant includes one or more amino acid substitutions selected from D1135M, S1136Q, G1218K, E1219F, A1322R, D1332A, R1335E, and T1337R (collectively termed “MQKFRAER”).

[0358] In some embodiments, the PAM is NGT. In some embodiments, the NGT PAM is a variant. In some embodiments, the NGT PAM variant is created through targeted mutations at one or more residues 1335, 1337, 1135, 1136, 1218, and/or 1219. In some embodiments, the NGT PAM variant is created through targeted mutations at one or more residues 1219, 1335, 1337, 1218. In some embodiments, the NGT PAM variant is created through targeted mutations at one or more residues 1135, 1136, 1218, 1219, and 1335. In some embodiments, the NGT PAM variant is selected from the set of targeted mutations provided in Tables 2 and 3 below.

TABLE 2
NGT PAM Variant Mutations at residues
1219, 1335, 1337, 1218

| Variant | E1219V | R1335Q | T1337 | G1218 |
|---|---|---|---|---|
| 1 | F | V | T | |
| 2 | F | V | R | |
| 3 | F | V | Q | |
| 4 | F | V | L | |
| 5 | F | V | T | R |
| 6 | F | V | R | R |
| 7 | F | V | Q | R |
| 8 | F | V | L | R |
| 9 | L | L | T | |
| 10 | L | L | R | |
| 11 | L | L | Q | |
| 12 | L | L | L | |
| 13 | F | I | T | |
| 14 | F | I | R | |
| 15 | F | I | Q | |
| 16 | F | I | L | |
| 17 | F | G | C | |
| 18 | H | L | N | |
| 19 | F | G | C | A |
| 20 | H | L | N | V |
| 21 | L | A | W | |
| 22 | L | A | F | |
| 23 | L | A | Y | |
| 24 | I | A | W | |
| 25 | I | A | F | |
| 26 | I | A | Y | |

TABLE 3
NGT PAM Variant Mutations at residues
1135, 1136, 1218, 1219, and 1335

| Variant | D1135L | S1136R | G1218S | E1219V | R1335Q |
|---|---|---|---|---|---|
| 27 | G | | | | |
| 28 | V | | | | |
| 29 | I | | | | |
| 30 | | A | | | |
| 31 | | W | | | |
| 32 | | H | | | |
| 33 | | K | | | |
| 34 | | | K | | |
| 35 | | | R | | |
| 36 | | | Q | | |
| 37 | | | T | | |
| 38 | | | N | | |
| 39 | | | | I | |
| 40 | | | | A | |
| 41 | | | | N | |
| 42 | | | | Q | |
| 43 | | | | G | |
| 44 | | | | L | |
| 45 | | | | S | |
| 46 | | | | T | |
| 47 | | | | | L |
| 48 | | | | | I |
| 49 | | | | | V |
| 50 | | | | | N |
| 51 | | | | | S |
| 52 | | | | | T |
| 53 | | | | | F |
| 54 | | | | | Y |
| 55 | N1286Q | I1331F | | | |

[0359] In some embodiments, the NGT PAM variant is selected from variant 5, 7, 28, 31, or 36 in Tables 2 and 3. In some embodiments, the variants have improved NGT PAM recognition.

[0360] In some embodiments, the NGT PAM variants have mutations at residues 1219, 1335, 1337, and/or 1218. In some embodiments, the NGT PAM variant is selected with mutations for improved recognition from the variants provided in Table 4 below.

TABLE 4
NGT PAM Variant Mutations at residues
1219, 1335, 1337, and 1218

| Variant | E1219V | R1335Q | T1337 | G1218 |
|---|---|---|---|---|
| 1 | F | V | T | |
| 2 | F | V | R | |
| 3 | F | V | Q | |
| 4 | F | V | L | |
| 5 | F | V | T | R |
| 6 | F | V | R | R |
| 7 | F | V | Q | R |
| 8 | F | V | L | R |

[0361] In some embodiments, the NGT PAM is selected from the variants provided in Table 5 below.

TABLE 5
NGT PAM variants

| | NGTN | | | | | | | |
|---|---|---|---|---|---|---|---|---|
| | variant | D1135 | S1136 | G1218 | E1219 | A1322R | R1335 | T1337 |
| Variant 1 | LRKIQK | L | R | K | I | — | Q | K |
| Variant 2 | LRSVQK | L | R | S | V | — | Q | K |
| Variant 3 | LRSVQL | L | R | S | V | — | Q | L |
| Variant 4 | LRKIRQK | L | R | K | I | R | Q | K |
| Variant 5 | LRSVRQK | L | R | S | V | R | Q | K |
| Variant 6 | LRSVRQL | L | R | S | V | R | Q | L |

[0362] In some embodiments, the Cas9 domain is a Cas9 domain from Streptococcus pyogenes (SpCas9). In some embodiments, the SpCas9 domain is a nuclease active SpCas9, a nuclease inactive SpCas9 (SpCas9d), or a SpCas9 nickase (SpCas9n). In some embodiments, the SpCas9 comprises a D9X mutation, or a corresponding mutation in any of the amino acid sequences provided herein, wherein X is any amino acid except for D. In some embodiments, the SpCas9 comprises a D9A mutation, or a corresponding mutation in any of the amino acid sequences provided herein. In some embodiments, the SpCas9 domain, the SpCas9d domain, or the SpCas9n domain can bind to a nucleic acid sequence having a non-canonical PAM. In some embodiments, the SpCas9 domain, the SpCas9d domain, or the SpCas9n domain can bind to a nucleic acid sequence having an NGG, a NGA, or a NGCG PAM sequence.

[0363] In some embodiments, the SpCas9 domain comprises one or more of a D1135X, a R1335X, and a T1336X mutation, or a corresponding mutation in any of the amino acid sequences provided herein, wherein X is any amino acid. In some embodiments, the SpCas9 domain comprises one or more of a D1135E, R1335Q, and T1336R mutation, or a corresponding mutation in any of the amino acid sequences provided herein. In some embodiments, the SpCas9 domain comprises a D1135E, a R1335Q, and a T1336R mutation, or corresponding mutations in any of the amino acid sequences provided herein. In some embodiments, the SpCas9 domain comprises one or more of a D1135X, a R1335X, and a T1336X mutation, or a corresponding mutation in any of the amino acid sequences provided herein, wherein X is any amino acid. In some embodiments, the SpCas9 domain comprises one or more of a D1135V, a R1335Q, and a T1336R mutation, or a corresponding mutation in any of the amino acid sequences provided herein. In some embodiments, the SpCas9 domain comprises a D1135V, a R1335Q, and a T1336R mutation, or corresponding mutations in any of the amino acid sequences provided herein. In some embodiments, the SpCas9 domain comprises one or more of a D1135X, a G1217X, a R1335X, and a T1336X mutation, or a corresponding mutation in any of the amino acid sequences provided herein, wherein X is any amino acid. In some embodiments, the SpCas9 domain comprises one or more of a D1135V, a G1217R, a R1335Q, and a T1336R mutation, or a corresponding mutation in any of the amino acid sequences provided herein. In some embodiments, the SpCas9 domain comprises a D1135V, a G1217R, a R1335Q, and a T1336R mutation, or corresponding mutations in any of the amino acid sequences provided herein. In some embodiments, the SpCas9 domain comprises one or more of the amino acid substitutions as shown in FIGS. 3A-3C and FIG. 10.

[0364] In some embodiments, the Cas9 domains of any of the fusion proteins provided herein comprises an amino acid sequence that is at least 60%, at least 65%, at least 70%, at least 75%, at least 80%, at least 85%, at least 90%, at least 95%, at least 96%, at least 97%, at least 98%, at least 99%, or at least 99.5% identical to a Cas9 polypeptide described herein. In some embodiments, the Cas9 domains of any of the fusion proteins provided herein comprises the amino acid sequence of any Cas9 polypeptide described herein. In some embodiments, the Cas9 domains of any of the fusion proteins provided herein consists of the amino acid sequence of any Cas9 polypeptide described herein.

[0365] In some examples, a PAM recognized by a CRISPR protein-derived domain of a base editor disclosed herein can be provided to a cell on a separate oligonucleotide to an insert (e.g., an AAV insert) encoding the base editor. In such embodiments, providing PAM on a separate oligonucleotide can allow cleavage of a target sequence that otherwise would not be able to be cleaved, because no adjacent PAM is present on the same polynucleotide as the target sequence.

[0366] In an embodiment, S. pyogenes Cas9 (SpCas9) can be used as a CRISPR endonuclease for genome engineering. However, others can be used. In some embodiments, a different endonuclease can be used to target certain genomic targets. In some embodiments, synthetic SpCas9-derived variants with non-NGG PAM sequences can be used. Additionally, other Cas9 orthologues from various species have been identified and these “non-SpCas9s” can bind a variety of PAM sequences that can also be useful for the present disclosure. For example, the relatively large size of SpCas9 (approximately 4 kb coding sequence) can lead to plasmids carrying the SpCas9 cDNA that cannot be efficiently expressed in a cell. Conversely, the coding sequence for Staphylococcus aureus Cas9 (SaCas9) is approximately 1 kilobase shorter than SpCas9, possibly allowing it to be efficiently expressed in a cell. Similar to SpCas9, the SaCas9 endonuclease is capable of modifying target genes in mammalian cells in vitro and in mice in vivo. In some embodiments, a Cas protein can target a different PAM sequence. In some embodiments, a target gene can be adjacent to a Cas9 PAM, 5′-NGG, for example. In some embodiments, a target gene can be adjacent to a Cas9 PAM, 5′-NGC or a Cas9 PAM comprising 5′-NGC, for example. In other embodiments, other Cas9 orthologs can have different PAM requirements. For example, other PAMs such as those of S. thermophilus (5′-NNAGAA for CRISPR1 and 5′-NGGNG for CRISPR3) and Neisseria meningiditis (5′-NNNNGATT) can also be found adjacent to a target gene.

[0367] In some embodiments, for a S. pyogenes system, a target gene sequence can precede (i.e., be 5′ to) a 5′-NGG PAM, and a 20-nt guide RNA sequence can base pair with an opposite strand to mediate a Cas9 cleavage adjacent to a PAM. In some embodiments, an adjacent cut can be or can be about 3 base pairs upstream of a PAM. In some embodiments, an adjacent cut can be or can be about 10 base pairs upstream of a PAM. In some embodiments, an adjacent cut can be or can be about 0-20 base pairs upstream of a PAM. For example, an adjacent cut can be next to, 1, 2, 3, 4, 5, 6, 7, 8, 9, 10, 11, 12, 13, 14, 15, 16, 17, 18, 19, 20, 21, 22, 23, 24, 25, 26, 27, 28, 29, or 30 base pairs upstream of a PAM. An adjacent cut can also be downstream of a PAM by 1 to 30 base pairs. The sequences of exemplary SpCas9 proteins capable of binding a PAM sequence follow:

[0368] The amino acid sequence of an exemplary PAM-binding SpCas9 is as follows:

MDKKYSIGLDIGTNSVGWAVITDEYKVPSKKFKVLGNTDRHSIKKNLIGAL
LFDSGETAEATRLKRTARRRYTRRKNRICYLQEIFSNEMAKVDDSFFHRLE
ESFLVEEDKKHERHPIFGNIVDEVAYHEKYPTIYHLRKKLVDSTDKADLRL
IYLALAHMIKFRGHFLIEGDLNPDNSDVDKLFIQLVQTYNQLFEENPINAS
GVDAKAILSARLSKSRRLENLIAQLPGEKKNGLFGNLIALSLGLTPNFKSN
FDLAEDAKLQLSKDTYDDDLDNLLAQIGDQYADLFLAAKNLSDAILLSDIL
RVNTEITKAPLSASMIKRYDEHHQDLTLLKALVRQQLPEKYKEIFFDQSKN
GYAGYIDGGASQEEFYKFIKPILEKMDGTEELLVKLNREDLLRKQRTFDNG
SIPHQIHLGELHAILRRQEDFYPFLKDNREKIEKILTFRIPYYVGPLARGN
SRFAWMTRKSEETITPWNFEEVVDKGASAQSFIERMTNFDKNLPNEKVLPK
HSLLYEYFTVYNELTKVKYVTEGMRKPAFLSGEQKKAIVDLLFKTNRKVTV
KQLKEDYFKKIECFDSVEISGVEDRFNASLGTYHDLLKIIKDKDFLDNEEN
EDILEDIVLTLTLFEDREMIEERLKTYAHLFDDKVMKQLKRRRYTGWGRLS
RKLINGIRDKQSGKTILDFLKSDGFANRNFMQLIHDDSLTFKEDIQKAQVS
GQGDSLHEHIANLAGSPAIKKGILQTVKVVDELVKVMGRHKPENIVIEMAR
ENQTTQKGQKNSRERMKRIEEGIKELGSQILKEHPVENTQLQNEKLYLYYL
QNGRDMYVDQELDINRLSDYDVDHIVPQSFLKDDSIDNKVLTRSDKNRGKS
DNVPSEEVVKKMKNYWRQLLNAKLITQRKFDNLTKAERGGLSELDKAGFIK
RQLVETRQITKHVAQILDSRMNTKYDENDKLIREVKVITLKSKLVSDFRKD
FQFYKVREINNYHHAHDAYLNAVVGTALIKKYPKLESEFVYGDYKVYDVRK
MIAKSEQEIGKATAKYFFYSNIMNFFKTEITLANGEIRKRPLIETNGETGE
IVWDKGRDFATVRKVLSMPQVNIVKKTEVQTGGFSKESILPKRNSDKLIAR
KKDWDPKKYGGFDSPTVAYSVLVVAKVEKGKSKKLKSVKELLGITIMERSS
FEKNPIDFLEAKGYKEVKKDLIIKLPKYSLFELENGRKRMLASAGELQKGN
ELALPSKYVNFLYLASHYEKLKGSPEDNEQKQLFVEQHKHYLDEIIEQISE
FSKRVILADANLDKVLSAYNKHRDKPIREQAENIIHLFTLTMLGAPAAFKY
FDTTIDRKRYTSTKEVLDATLIHQSITGLYETRIDLSQLGGD.

[0369] The amino acid sequence of an exemplary PAM-binding SpCas9n is as follows:

MDKKYSIGLAIGTNSVGWAVITDEYKVPSKKFKVLGNTDRHSIKKNLIGAL
LFDSGETAEATRLKRTARRRYTRRKNRICYLQEIFSNEMAKVDDSFFHRLE
ESFLVEEDKKHERHPIFGNIVDEVAYHEKYPTIYHLRKKLVDSTDKADLRL
IYLALAHMIKFRGHFLIEGDLNPDNSDVDKLFIQLVQTYNQLFEENPINAS
GVDAKAILSARLSKSRRLENLIAQLPGEKKNGLFGNLIALSLGLTPNFKSN
FDLAEDAKLQLSKDTYDDDLDNLLAQIGDQYADLFLAAKNLSDAILLSDIL
RVNTEITKAPLSASMIKRYDEHHQDLTLLKALVRQQLPEKYKEIFFDQSKN
GYAGYIDGGASQEEFYKFIKPILEKMDGTEELLVKLNREDLLRKQRTFDNG
SIPHQIHLGELHAILRRQEDFYPFLKDNREKIEKILTFRIPYYVGPLARGN
SRFAWMTRKSEETITPWNFEEVVDKGASAQSFIERMTNFDKNLPNEKVLPK
HSLLYEYFTVYNELTKVKYVTEGMRKPAFLSGEQKKAIVDLLFKTNRKVTV
KQLKEDYFKKIECFDSVEISGVEDRFNASLGTYHDLLKIIKDKDFLDNEEN
EDILEDIVLTLTLFEDREMIEERLKTYAHLFDDKVMKQLKRRRYTGWGRLS
RKLINGIRDKQSGKTILDFLKSDGFANRNFMQLIHDDSLTFKEDIQKAQVS
GQGDSLHEHIANLAGSPAIKKGILQTVKVVDELVKVMGRHKPENIVIEMAR
ENQTTQKGQKNSRERMKRIEEGIKELGSQILKEHPVENTQLQNEKLYLYYL
QNGRDMYVDQELDINRLSDYDVDHIVPQSFLKDDSIDNKVLTRSDKNRGKS
DNVPSEEVVKKMKNYWRQLLNAKLITQRKFDNLTKAERGGLSELDKAGFIK
RQLVETRQITKHVAQILDSRMNTKYDENDKLIREVKVITLKSKLVSDFRKD
FQFYKVREINNYHHAHDAYLNAVVGTALIKKYPKLESEFVYGDYKVYDVRK
MIAKSEQEIGKATAKYFFYSNIMNFFKTEITLANGEIRKRPLIETNGETGE
IVWDKGRDFATVRKVLSMPQVNIVKKTEVQTGGFSKESILPKRNSDKLIAR
KKDWDPKKYGGFDSPTVAYSVLVVAKVEKGKSKKLKSVKELLGITIMERSS
FEKNPIDFLEAKGYKEVKKDLIIKLPKYSLFELENGRKRMLASAGELQKGN
ELALPSKYVNFLYLASHYEKLKGSPEDNEQKQLFVEQHKHYLDEIIEQISE
FSKRVILADANLDKVLSAYNKHRDKPIREQAENIIHLFTLTNLGAPAAFKY
FDTTIDRKRYTSTKEVLDATLIHQSITGLYETRIDLSQLGGD.

[0370] The amino acid sequence of an exemplary PAM-binding SpEQR Cas9 is as follows:

MDKKYSIGLAIGTNSVGWAVITDEYKVPSKKFKVLGNTDRHSIKKNLIGAL
LFDSGETAEATRLKRTARRRYTRRKNRICYLQEIFSNEMAKVDDSFFHRLE
ESFLVEEDKKHERHPIFGNIVDEVAYHEKYPTIYHLRKKLVDSTDKADLRL
IYLALAHMIKFRGHFLIEGDLNPDNSDVDKLFIQLVQTYNQLFEENPINAS
GVDAKAILSARLSKSRRLENLIAQLPGEKKNGLFGNLIALSLGLTPNFKSN
FDLAEDAKLQLSKDTYDDDLDNLLAQIGDQYADLFLAAKNLSDAILLSDIL
RVNTEITKAPLSASMIKRYDEHHQDLTLLKALVRQQLPEKYKEIFFDQSKN
GYAGYIDGGASQEEFYKFIKPILEKMDGTEELLVKLNREDLLRKQRTFDNG
SIPHQIHLGELHAILRRQEDFYPFLKDNREKIEKILTFRIPYYVGPLARGN
SRFAWMTRKSEETITPWNFEEVVDKGASAQSFIERMTNFDKNLPNEKVLPK
HSLLYEYFTVYNELTKVKYVTEGMRKPAFLSGEQKKAIVDLLFKTNRKVTV
KQLKEDYFKKIECFDSVEISGVEDRFNASLGTYHDLLKIIKDKDFLDNEEN
EDILEDIVLTLTLFEDREMIEERLKTYAHLFDDKVMKQLKRRRYTGWGRLS
RKLINGIRDKQSGKTILDFLKSDGFANRNFMQLIHDDSLTFKEDIQKAQVS
GQGDSLHEHIANLAGSPAIKKGILQTVKVVDELVKVMGRHKPENIVIEMAR
ENQTTQKGQKNSRERMKRIEEGIKELGSQILKEHPVENTQLQNEKLYLYYL
QNGRDMYVDQELDINRLSDYDVDHIVPQSFLKDDSIDNKVLTRSDKNRGKS
DNVPSEEVVKKMKNYWRQLLNAKLITQRKFDNLTKAERGGLSELDKAGFIK
RQLVETRQITKHVAQILDSRMNTKYDENDKLIREVKVITLKSKLVSDFRKD
FQFYKVREINNYHHAHDAYLNAVVGTALIKKYPKLESEFVYGDYKVYDVRK
MIAKSEQEIGKATAKYFFYSNIMNFFKTEITLANGEIRKRPLIETNGETGE
IVWDKGRDFATVRKVLSMPQVNIVKKTEVQTGGFSKESILPKRNSDKLIAR
KKDWDPKKYGGF [symbol] SPTVAYSVLVVAKVEKGKSKKLKSVKELLGITIMERSS
FEKNPIDFLEAKGYKEVKKDLIIKLPKYSLFELENGRKRMLASAGELQKGN
ELALPSKYVNFLYLASHYEKLKGSPEDNEQKQLFVEQHKHYLDEIIEQISE
FSKRVILADANLDKVLSAYNKHRDKPIREQAENIIHLFTLTNLGAPAAFKY
FDTTIDRK [symbol] Y [symbol] STKEVLDATLIHQSITGLYETRIDLSQLGGD.
In this sequence, residues E1135, Q1335 and R1337,
which can be mutated from D1135, R1335. and T1337
to yield a SpEQR Cas9, are underlined and in bold.

[0371] The amino acid sequence of an exemplary PAM-binding SpVQR Cas9 is as follows:

MDKKYSIGLAIGTNSVGWAVITDEYKVPSKKFKVLGNTDRHSIKKNLIGAL
LFDSGETAEATRLKRTARRRYTRRKNRICYLQEIFSNEMAKVDDSFFHRLE
ESFLVEEDKKHERHPIFGNIVDEVAYHEKYPTIYHLRKKLVDSTDKADLRL
IYLALAHMIKFRGHFLIEGDLNPDNSDVDKLFIQLVQTYNQLFEENPINAS
GVDAKAILSARLSKSRRLENLIAQLPGEKKNGLFGNLIALSLGLTPNFKSN
FDLAEDAKLQLSKDTYDDDLDNLLAQIGDQYADLFLAAKNLSDAILLSDIL
RVNTEITKAPLSASMIKRYDEHHQDLTLLKALVRQQLPEKYKEIFFDQSKN
GYAGYIDGGASQEEFYKFIKPILEKMDGTEELLVKLNREDLLRKQRTFDNG
SIPHQIHLGELHAILRRQEDFYPFLKDNREKIEKILTFRIPYYVGPLARGN
SRFAWMTRKSEETITPWNFEEVVDKGASAQSFIERMTNFDKNLPNEKVLPK
HSLLYEYFTVYNELTKVKYVTEGMRKPAFLSGEQKKAIVDLLFKTNRKVTV
KQLKEDYFKKIECFDSVEISGVEDRFNASLGTYHDLLKIIKDKDFLDNEEN
EDILEDIVLTLTLFEDREMIEERLKTYAHLFDDKVMKQLKRRRYTGWGRLS
RKLINGIRDKQSGKTILDFLKSDGFANRNFMQLIHDDSLTFKEDIQKAQVS
GQGDSLHEHIANLAGSPAIKKGILQTVKVVDELVKVMGRHKPENIVIEMAR
ENQTTQKGQKNSRERMKRIEEGIKELGSQILKEHPVENTQLQNEKLYLYYL
QNGRDMYVDQELDINRLSDYDVDHIVPQSFLKDDSIDNKVLTRSDKNRGKS
DNVPSEEVVKKMKNYWRQLLNAKLITQRKFDNLTKAERGGLSELDKAGFIK
RQLVETRQITKHVAQILDSRMNTKYDENDKLIREVKVITLKSKLVSDFRKD
FQFYKVREINNYHHAHDAYLNAVVGTALIKKYPKLESEFVYGDYKVYDVRK
MIAKSEQEIGKATAKYFFYSNIMNFFKTEITLANGEIRKRPLIETNGETGE
IVWDKGRDFATVRKVLSMPQVNIVKKTEVQTGGFSKESILPKRNSDKLIAR
KKDWDPKKYGGF [symbol] SPTVAYSVLVVAKVEKGKSKKLKSVKELLGITIMERSS
FEKNPIDFLEAKGYKEVKKDLIIKLPKYSLFELENGRKRMLASAGELQKGN
ELALPSKYVNFLYLASHYEKLKGSPEDNEQKQLFVEQHKHYLDEIIEQISE
FSKRVILADANLDKVLSAYNKHRDKPIREQAENIIHLFTLTNLGAPAAFKY
FDTTIDRK [symbol] Y [symbol] STKEVLDATLIHQSITGLYETRIDLSQLGGD.
In this sequence, residues V1135, Q1335, and R1336,
which can be mutated from D1135, R1335, and T1336
to yield a SpVQR Cas9, are underlined and in bold.

[0372] The amino acid sequence of an exemplary PAM-binding SpVRER Cas9 is as follows:

MDKKYSIGLAIGTNSVGWAVITDEYKVPSKK
FKVLGNTDRHSIKKNLIGALLFDSGETAEAT
RLKRTARRRYTRRKNRICYLQEIFSNEMAKV
DDSFFHRLEESFLVEEDKKHERHPIFGNIVD
EVAYHEKYPTIYHLRKKLVDSTDKADLRLIY
LALAHMIKFRGHFLIEGDLNPDNSDVDKLFI
QLVQTYNQLFEENPINASGVDAKAILSARLS
KSRRLENLIAQLPGEKKNGLFGNLIALSLGL
TPNFKSNFDLAEDAKLQLSKDTYDDDLDNLL
AQIGDQYADLFLAAKNLSDAILLSDILRVNT
EITKAPLSASMIKRYDEHHQDLTLLKALVRQ
QLPEKYKEIFFDQSKNGYAGYIDGGASQEEF
YKFIKPILEKMDGTEELLVKLNREDLLRKQR
TFDNGSIPHQIHLGELHAILRRQEDFYPFLK
DNREKIEKILTFRIPYYVGPLARGNSRFAWM
TRKSEETITPWNFEEVVDKGASAQSFIERMT
NFDKNLPNEKVLPKHSLLYEYFTVYNELTKV
KYVTEGMRKPAFLSGEQKKAIVDLLFKTNRK
VTVKQLKEDYFKKIECFDSVEISGVEDRFNA
SLGTYHDLLKIIKDKDFLDNEENEDILEDIV
LTLTLFEDREMIEERLKTYAHLFDDKVMKQL
KRRRYTGWGRLSRKLINGIRDKQSGKTILDF
LKSDGFANRNFMQLIHDDSLTFKEDIQKAQV
SGQGDSLHEHIANLAGSPAIKKGILQTVKVV
DELVKVMGRHKPENIVIEMARENQTTQKGQK
NSRERMKRIEEGIKELGSQILKEHPVENTQL
QNEKLYLYYLQNGRDMYVDQELDINRLSDYD
VDHIVPQSFLKDDSIDNKVLTRSDKNRGKSD
NVPSEEVVKKMKNYWRQLLNAKLITQRKFDN
LTKAERGGLSELDKAGFIKRQLVETRQITKH
VAQILDSRMNTKYDENDKLIREVKVITLKSK
LVSDFRKDFQFYKVREINNYHHAHDAYLNAV
VGTALIKKYPKLESEFVYGDYKVYDVRKMIA
KSEQEIGKATAKYFFYSNIMNFFKTEITLAN
GEIRKRPLIETNGETGEIVWDKGRDFATVRK
VLSMPQVNIVKKTEVQTGGFSKESILPKRNS
DKLIARKKDWDPKKYGGF [symbol] SPTVAYSVLVVA
KVEKGKSKKLKSVKELLGITIMERSSFEKNP
IDFLEAKGYKEVKKDLIIKLPKYSLFELENG
RKRMLASA [symbol] ELQKGNELALPSKYVNFLYLAS
HYEKLKGSPEDNEQKQLFVEQHKHYLDEIIE
QISEFSKRVILADANLDKVLSAYNKHRDKPI
REQAENIIHLFTLTNLGAPAAFKYFDTTIDR
K [symbol] Y [symbol] STKEVLDATLIHQSITGLYET
RIDLSQLGQD

[0373] In some embodiments, the Cas9 domain is a recombinant Cas9 domain. In some embodiments, the recombinant Cas9 domain is a SpyMacCas9 domain. In some embodiments, the SpyMacCas9 domain is a nuclease active SpyMacCas9, a nuclease inactive SpyMacCas9 (SpyMacCas9d), or a SpyMacCas9 nickase (SpyMacCas9n). In some embodiments, the SaCas9 domain, the SaCas9d domain, or the SaCas9n domain can bind to a nucleic acid sequence having a non-canonical PAM. In some embodiments, the SpyMacCas9 domain, the SpCas9d domain, or the SpCas9n domain can bind to a nucleic acid sequence having a NAA PAM sequence.

Exemplary SpyMacCas9
MDKKYSIGLDIGTNSVGWAVITDDYKVPSKKFKVLG
NTDRHSIKKNLIGALLFGSGETAEATRLKRTARRR
YTRRKNRICYLQEIFSNEMAKVDDSFFHRLEESFL
VEEDKKHERHPIFGNIVDEVAYHEKYPTIYHLRKK
LADSTDKADLRLIYLALAHMIKFRGHFLIEGDLNP
DNSDVDKLFIQLVQIYNQLFEENPINASRVDAKAI
LSARLSKSRRLENLIAQLPGEKRNGLFGNLIALSL
GLTPNFKSNFDLAEDAKLQLSKDTYDDDLDNLLAQ
IGDQYADLFLAAKNLSDAILLSDILRVNSEITKAP
LSASMIKRYDEHHQDLTLLKALVRQQLPEKYKEIF
FDQSKNGYAGYIDGGASQEEFYKFIKPILEKMDGT
EELLVKLNREDLLRKQRTFDNGSIPHQIHLGELHA
ILRRQEDFYPFLKDNREKIEKILTFRIPYYVGPLA
RGNSRFAWMTRKSEETITPWNFEEVVDKGASAQSF
IERMTNFDKNLPNEKVLPKHSLLYEYFTVYNELTK
VKYVTEGMRKPAFLSGEQKKAIVDLLFKTNRKVTV
KQLKEDYFKKIECFDSVEISGVEDRFNASLGAYHD
LLKIIKDKDFLDNEENEDILEDIVLTLTLFEDRGM
IEERLKTYAHLFDDKVMKQLKRRRYTGWGRLSRKL
INGIRDKQSGKTILDFLKSDGFANRNFMQLIHDDS
LTFKEDIQKAQVSGQGHSLHEQIANLAGSPAIKKG
ILQTVKIVDELVKVMGHKPENIVIEMARENQTTQK
GQKNSRERMKRIEEGIKELGSQILKEHPVENTQLQ
NEKLYLYYLQNGRDMYVDQELDINRLSDYDVDHIV
PQSFIKDDSIDNKVLTRSDKNRGKSDNVPSEEVVK
KMKNYWRQLLNAKLITQRKFDNLTKAERGGLSELD
KAGFIKRQLVETRQITKHVAQILDSRMNTKYDEND
KLIREVKVITLKSKLVSDFRKDFQFYKVREINNYH
HAHDAYLNAVVGTALIKKYPKLESEFVYGDYKVYD
VRKMIAKSEQEIGKATAKYFFYSNIMNFFKTEITL
ANGEIRKRPLIETNGETGEIVWDKGRDFATVRKVL
SMPQVNIVKKTEIQTVGQNGGLFDDNPKSPLEVTP
SKLVPLKKELNPKKYGGYQKPTTAYPVLLITDTKQ
LIPISVMNKKQFEQNPVKFLRDRGYQQVGKNDFIK
LPKYTLVDIGDGIKRLWASSKEIHKGNQLVVSKKS
QILLYHAHHLDSDLSNDYLQNHNQQFDVLFNEIIS
FSKKCKLGKEHIQKIENVYSNKKNSASIEELAESF
IKLLGFTQLGATSPFNFLGVKLNQKQYKGKKDYIL
PCTEGTLIRQSITGLYETRVDLSKIGED.

[0374] In some cases, a variant Cas9 protein harbors, H840A, P475A, W476A, N477A, D1125A, W1126A, and D1218A mutations such that the polypeptide has a reduced ability to cleave a target DNA or RNA. Such a Cas9 protein has a reduced ability to cleave a target DNA (e.g., a single stranded target DNA) but retains the ability to bind a target DNA (e.g., a single stranded target DNA). As another non-limiting example, in some cases, the variant Cas9 protein harbors D10A, H840A, P475A, W476A, N477A, D1125A, W1126A, and D1218A mutations such that the polypeptide has a reduced ability to cleave a target DNA. Such a Cas9 protein has a reduced ability to cleave a target DNA (e.g., a single stranded target DNA) but retains the ability to bind a target DNA (e.g., a single stranded target DNA). In some cases, when a variant Cas9 protein harbors W476A and W1126A mutations or when the variant Cas9 protein harbors P475A, W476A, N477A, D1125A, W1126A, and D1218A mutations, the variant Cas9 protein does not bind efficiently to a PAM sequence. Thus, in some such cases, when such a variant Cas9 protein is used in a method of binding, the method does not require a PAM sequence. In other words, in some cases, when such a variant Cas9 protein is used in a method of binding, the method can include a guide RNA, but the method can be performed in the absence of a PAM sequence (and the specificity of binding is therefore provided by the targeting segment of the guide RNA). Other residues can be mutated to achieve the above effects (i.e., inactivate one or the other nuclease portions). As non-limiting examples, residues D10, G12, G17, E762, H840, N854, N863, H982, H983, A984, D986, and/or A987 can be altered (i.e., substituted). Also, mutations other than alanine substitutions are suitable.

[0375] In some embodiments, a CRISPR protein-derived domain of a base editor can comprise all or a portion of a Cas9 protein with a canonical PAM sequence (NGG). In other embodiments, a Cas9-derived domain of a base editor can employ a non-canonical PAM sequence. Such sequences have been described in the art and would be apparent to the skilled artisan. For example, Cas9 domains that bind non-canonical PAM sequences have been described in Kleinstiver, B. P., et al., “Engineered CRISPR-Cas9 nucleases with altered PAM specificities” Nature 523, 481-485 (2015); and Kleinstiver, B. P., et al., “Broadening the targeting range of Staphylococcus aureus CRISPR-Cas9 by modifying PAM recognition” Nature Biotechnology 33, 1293-1298 (2015); the entire contents of each are hereby incorporated by reference.

Fusion Proteins Comprising a Cas9 Domain and a Cytidine Deaminase and/or Adenosine Deaminase

[0376] Some aspects of the disclosure provide fusion proteins comprising a Cas9 domain or other nucleic acid programmable DNA binding protein and one or more adenosine deaminase domain, cytidine deaminase domain, and/or DNA glycosylase domains. It should be appreciated that the Cas9 domain may be any of the Cas9 domains or Cas9 proteins (e.g., dCas9 or nCas9) provided herein. In an embodiment, the Cas9 domain is an SpCas9 domain or an SpCas9 variant domain as described herein. In some embodiments, any of the Cas9 domains or Cas9 proteins (e.g., dCas9 or nCas9) provided herein may be fused with any of the cytidine deaminases and adenosine deaminases provided herein. The domains of the base editors disclosed herein can be arranged in any order.

[0377] For example, and without limitation, in some embodiments, the fusion protein comprises the structure:

NH₂-[cytidine deaminase]-[Cas9 domain]-[adenosine deaminase]-COOH;
NH₂-[adenosine deaminase]-[Cas9 domain]-[cytidine deaminase]-COOH;
NH₂-[adenosine deaminase]-[cytidine deaminase]-[Cas9 domain]-COOH;
NH₂-[cytidine deaminase]-[adenosine deaminase]-[Cas9 domain]-COOH;
NH₂-[Cas9 domain]-[adenosine deaminase]-[cytidine deaminase]-COOH; or
NH₂-[Cas9 domain]-[cytidine deaminase]-[adenosine deaminase]-COOH.

[0378] In some embodiments, the adenosine deaminase of the fusion protein comprises a TadA*8 and a cytidine deaminase. In some embodiments, the TadA*8 is TadA*8.1, TadA*8.2, TadA*8.3, TadA*8.4, TadA*8.5, TadA*8.6, TadA*8.7, TadA*8.8, TadA*8.9, TadA*8.10, TadA*8.11, TadA*8.12, TadA*8.13, TadA*8.14, TadA*8.15, TadA*8.16, TadA*8.17, TadA*8.18, TadA*8.19, TadA*8.20, TadA*8.21, TadA*8.22, TadA*8.23, or TadA*8.24.

[0379] Exemplary fusion protein structures include the following:

NH₂-[adenosine deaminase]-[Cas9]-[cytidine deaminase]-COOH;
NH₂-[cytidine deaminase]-[Cas9]-[adenosine deaminase]-COOH;
NH₂-[TadA*8]-[Cas9]-[cytidine deaminase]-COOH; or
NH₂-[cytidine deaminase]-[Cas9]-[TadA*8]-COOH.

[0380] In some embodiments, the fusion proteins comprising a cytidine deaminase, abasic editor, and adenosine deaminase and a napDNAbp (e.g., Cas9 domain) do not include a linker sequence. In some embodiments, a linker is present between the cytidine deaminase and adenosine deaminase domains and the napDNAbp. In some embodiments, the “-” used in the general architecture above indicates the presence of an optional linker. In some embodiments, the cytidine deaminase and adenosine deaminase and the napDNAbp are fused via any of the linkers provided herein. For example, in some embodiments the cytidine deaminase and adenosine deaminase and the napDNAbp are fused via any of the linkers provided below in the section entitled “Linkers”.

[0381] In some embodiments, the general architecture of exemplary Cas9 or Cas12 fusion proteins with a cytidine deaminase, adenosine deaminase and a Cas9 or Cas12 domain comprises any one of the following structures, where NLS is a nuclear localization sequence (e.g., any NLS provided herein), NH₂ is the N-terminus of the fusion protein, and COOH is the C-terminus of the fusion protein.

[0382] NH₂-NLS-[cytidine deaminase]-[Cas9 domain]-[adenosine deaminase]-COOH;

[0383] NH₂-NLS-[adenosine deaminase]-[Cas9 domain]-[cytidine deaminase]-COOH;

[0384] NH₂-NLS-[adenosine deaminase] [cytidine deaminase]-[Cas9 domain]-COOH;

[0385] NH₂-NLS-[cytidine deaminase]-[adenosine deaminase]-[Cas9 domain]-COOH;

[0386] NH₂-NLS-[Cas9 domain]-[adenosine deaminase]-[cytidine deaminase]-COOH;

[0387] NH₂-NLS-[Cas9 domain]-[cytidine deaminase]-[adenosine deaminase]-COOH;

[0388] NH₂-[cytidine deaminase]-[Cas9 domain]-[adenosine deaminase]-NLS—COOH;

[0389] NH₂-[adenosine deaminase]-[Cas9 domain]-[cytidine deaminase]-NL2-COOH;

[0390] NH₂-[adenosine deaminase] [cytidine deaminase]-[Cas9 domain]-NLS—COOH;

[0391] NH₂-[cytidine deaminase]-[adenosine deaminase]-[Cas9 domain]-NLS—COOH;

[0392] NH₂-[Cas9 domain]-[adenosine deaminase]-[cytidine deaminase]-NLS—COOH; or

[0393] NH₂-[Cas9 domain]-[cytidine deaminase]-[adenosine deaminase]-NLS—COOH.

[0394] In some embodiments, the NLS is present in a linker or the NLS is flanked by linkers, for example described herein. In some embodiments, the N-terminus or C-terminus NLS is a bipartite NLS. A bipartite NLS comprises two basic amino acid clusters, which are separated by a relatively short spacer sequence (hence bipartite—2 parts, while monopartite NLSs are not). The NLS of nucleoplasmin, KR[PAATKKAGQA]KKKK, is the prototype of the ubiquitous bipartite signal: two clusters of basic amino acids, separated by a spacer of about 10 amino acids. The sequence of an exemplary bipartite NLS follows:

PKKKRKVEGADKRTADGSEFESPKKKRKV.

[0395] In some embodiments, the fusion proteins comprising a cytidine deaminase, adenosine deaminase, a Cas9 domain and an NLS do not comprise a linker sequence. In some embodiments, linker sequences between one or more of the domains or proteins (e.g., cytidine deaminase, adenosine deaminase, Cas9 domain or NLS) are present.

[0396] It should be appreciated that the fusion proteins of the present disclosure may comprise one or more additional features. For example, in some embodiments, the fusion protein may comprise inhibitors, cytoplasmic localization sequences, export sequences, such as nuclear export sequences, or other localization sequences, as well as sequence tags that are useful for solubilization, purification, or detection of the fusion proteins. Suitable protein tags provided herein include, but are not limited to, biotin carboxylase carrier protein (BCCP) tags, myc-tags, calmodulin-tags, FLAG-tags, hemagglutinin (HA)-tags, polyhistidine tags, also referred to as histidine tags or His-tags, maltose binding protein (MBP)-tags, nus-tags, glutathione-S-transferase (GST)-tags, green fluorescent protein (GFP)-tags, thioredoxin-tags, S-tags, Softags (e.g., Softag 1, Softag 3), strep-tags, biotin ligase tags, FlAsH tags, V5 tags, and SBP-tags. Additional suitable sequences will be apparent to those of skill in the art. In some embodiments, the fusion protein comprises one or more His tags.

[0397] Exemplary, yet nonlimiting, fusion proteins are described in International PCT Application Nos. PCT/2017/044935 and PCT/US2020/016288, each of which is incorporated herein by reference for its entirety.

### Fusion Proteins Comprising a Nuclear Localization Sequence (NLS)

[0398] In some embodiments, the fusion proteins provided herein further comprise one or more (e.g., 2, 3, 4, 5) nuclear targeting sequences, for example a nuclear localization sequence (NLS). In one embodiment, a bipartite NLS is used. In some embodiments, a NLS comprises an amino acid sequence that facilitates the importation of a protein, that comprises an NLS, into the cell nucleus (e.g., by nuclear transport). In some embodiments, any of the fusion proteins provided herein further comprise a nuclear localization sequence (NLS). In some embodiments, the NLS is fused to the N-terminus of the fusion protein. In some embodiments, the NLS is fused to the C-terminus of the fusion protein. In some embodiments, the NLS is fused to the N-terminus of the Cas9 domain. In some embodiments, the NLS is fused to the C-terminus of an nCas9 domain or a dCas9 domain. In some embodiments, the NLS is fused to the N-terminus of the deaminase. In some embodiments, the NLS is fused to the C-terminus of the deaminase. In some embodiments, the NLS is fused to the fusion protein via one or more linkers. In some embodiments, the NLS is fused to the fusion protein without a linker. In some embodiments, the NLS comprises an amino acid sequence of any one of the NLS sequences provided or referenced herein. Additional nuclear localization sequences are known in the art and would be apparent to the skilled artisan. For example, NLS sequences are described in Plank et al., PCT/EP2000/011690, the contents of which are incorporated herein by reference for their disclosure of exemplary nuclear localization sequences. In some embodiments, an NLS comprises the amino acid sequence PKKKRKVEGADKRTADGSEFESPKKKRKV, KRTADGSEFESPKKKRKV, KRPAATKKAGQAKKKK, KKTELQTTNAENKTKKL, KRGINDRNFWRGENGRKTR, RKSGKIAAIVVKRPRKPKKKRKV, or MDSLLMNRRKFLYQFKNVRWAKGRRETYLC. In some embodiments, the NLS is present in a linker or the NLS is flanked by linkers, for example, the linkers described herein. In some embodiments, the N-terminus or C-terminus NLS is a bipartite NLS. A bipartite NLS comprises two basic amino acid clusters, which are separated by a relatively short spacer sequence (hence bipartite—2 parts, while monopartite NLSs are not). The NLS of nucleoplasmin, KR[PAATKKAGQA]KKKK, is the prototype of the ubiquitous bipartite signal: two clusters of basic amino acids, separated by a spacer of about 10 amino acids. The sequence of an exemplary bipartite NLS follows: PKKKRKVEGADKRTADGSEFES PKKKRKV.

[0399] In some embodiments, the fusion proteins of the invention do not comprise a linker sequence. In some embodiments, linker sequences between one or more of the domains or proteins are present. In some embodiments, the general architecture of exemplary Cas9 fusion proteins with an adenosine deaminase or a cytidine deaminase and a Cas9 domain comprises any one of the following structures, where NLS is a nuclear localization sequence (e.g., any NLS provided herein), NH₂ is the N-terminus of the fusion protein, and COOH is the C-terminus of the fusion protein:

[0400] NH₂-NLS-[adenosine deaminase]-[Cas9 domain]-COOH;

[0401] NH₂-NLS [Cas9 domain]-[adenosine deaminase]-COOH;

[0402] NH₂-[adenosine deaminase]-[Cas9 domain]-NLS—COOH;

[0403] NH₂-[Cas9 domain]-[adenosine deaminase]-NLS—COOH;

[0404] NH₂-NLS-[cytidine deaminase]-[Cas9 domain]-COOH;

[0405] NH₂-NLS [Cas9 domain]-[cytidine deaminase]-COOH;

[0406] NH₂-[cytidine deaminase]-[Cas9 domain]-NLS—COOH; or

[0407] NH₂-[Cas9 domain]-[cytidine deaminase]-NLS—COOH.

[0408] It should be appreciated that the fusion proteins of the present disclosure may comprise one or more additional features. For example, in some embodiments, the fusion protein may comprise inhibitors, cytoplasmic localization sequences, export sequences, such as nuclear export sequences, or other localization sequences, as well as sequence tags that are useful for solubilization, purification, or detection of the fusion proteins. Suitable protein tags provided herein include, but are not limited to, biotin carboxylase carrier protein (BCCP) tags, myc-tags, calmodulin-tags, FLAG-tags, hemagglutinin (HA)-tags, polyhistidine tags, also referred to as histidine tags or His-tags, maltose binding protein (MBP)-tags, nus-tags, glutathione-S-transferase (GST)-tags, green fluorescent protein (GFP)-tags, thioredoxin-tags, S-tags, Softags (e.g., Softag 1, Softag 3), strep-tags, biotin ligase tags, FlAsH tags, V5 tags, and SBP-tags. Additional suitable sequences will be apparent to those of skill in the art. In some embodiments, the fusion protein comprises one or more His tags.

[0409] A vector that encodes a CRISPR enzyme comprising one or more nuclear localization sequences (NLSs) can be used. For example, there can be or be about 1, 2, 3, 4, 5, 6, 7, 8, 9, 10 NLSs used. A CRISPR enzyme can comprise the NLSs at or near the ammo-terminus, about or more than about 1, 2, 3, 4, 5, 6, 7, 8, 9, 10 NLSs at or near the carboxy-terminus, or any combination of these (e.g., one or more NLS at the ammo-terminus and one or more NLS at the carboxy terminus). When more than one NLS is present, each can be selected independently of others, such that a single NLS can be present in more than one copy and/or in combination with one or more other NLSs present in one or more copies.

[0410] CRISPR enzymes used in the methods can comprise about 6 NLSs. An NLS is considered near the N- or C-terminus when the nearest amino acid to the NLS is within about 50 amino acids along a polypeptide chain from the N- or C-terminus, e.g., within 1, 2, 3, 4, 5, 10, 15, 20, 25, 30, 40, or 50 amino acids.

Fusion Proteins with Internal Insertions

[0411] Provided herein are fusion proteins comprising a heterologous polypeptide fused to a nucleic acid programmable nucleic acid binding protein, for example, a napDNAbp. A heterologous polypeptide can be a polypeptide that is not found in the native or wild-type napDNAbp polypeptide sequence. The heterologous polypeptide can be fused to the napDNAbp at a C-terminal end of the napDNAbp, an N-terminal end of the napDNAbp, or inserted at an internal location of the napDNAbp. In some embodiments, the heterologous polypeptide is inserted at an internal location of the napDNAbp.

[0412] In some embodiments, the heterologous polypeptide is a deaminase or a functional fragment thereof. For example, a fusion protein can comprise a deaminase flanked by an N-terminal fragment and a C-terminal fragment of a Cas9 or Cas12 (e.g., Cas12b/C2c1), polypeptide. The deaminase in a fusion protein can be an adenosine deaminase. In some embodiments, the adenosine deaminase is a TadA (e.g., TadA7.10 or TadA*8). In some embodiments, the TadA is a TadA*8. TadA sequences (e.g., TadA7.10 or TadA*8) as described herein are suitable deaminases for the above-described fusion proteins.

[0413] The deaminase can be a circular permutant deaminase. For example, the deaminase can be a circular permutant adenosine deaminase. In some embodiments, the deaminase is a circular permutant TadA, circularly permutated at amino acid residue 116 as numbered in the TadA reference sequence. In some embodiments, the deaminase is a circular permutant TadA, circularly permutated at amino acid residue 136 as numbered in the TadA reference sequence. In some embodiments, the deaminase is a circular permutant TadA, circularly permutated at amino acid residue 65 as numbered in the TadA reference sequence.

[0414] The fusion protein can comprise more than one deaminase. The fusion protein can comprise, for example, 1, 2, 3, 4, 5 or more deaminases. In some embodiments, the fusion protein comprises one deaminase. In some embodiments, the fusion protein comprises two deaminases. The two or more deaminases in a fusion protein can be an adenosine deaminase. cytidine deaminase, or a combination thereof. The two or more deaminases can be homodimers. The two or more deaminases can be heterodimers. The two or more deaminases can be inserted in tandem in the napDNAbp. In some embodiments, the two or more deaminases may not be in tandem in the napDNAbp.

[0415] In some embodiments, the napDNAbp in the fusion protein is a Cas9 polypeptide or a fragment thereof. The Cas9 polypeptide can be a variant Cas9 polypeptide. In some embodiments, the Cas9 polypeptide is a Cas9 nickase (nCas9) polypeptide or a fragment thereof. In some embodiments, the Cas9 polypeptide is a nuclease dead Cas9 (dCas9) polypeptide or a fragment thereof. The Cas9 polypeptide in a fusion protein can be a full-length Cas9 polypeptide. In some cases, the Cas9 polypeptide in a fusion protein may not be a full length Cas9 polypeptide. The Cas9 polypeptide can be truncated, for example, at a N-terminal or C-terminal end relative to a naturally-occurring Cas9 protein. The Cas9 polypeptide can be a circularly permuted Cas9 protein. The Cas9 polypeptide can be a fragment, a portion, or a domain of a Cas9 polypeptide, that is still capable of binding the target polynucleotide and a guide nucleic acid sequence.

[0416] In some embodiments, the Cas9 polypeptide is a Streptococcus pyogenes Cas9 (SpCas9), Staphylococcus aureus Cas9 (SaCas9), Streptococcus thermophilus 1 Cas9 (St1Cas9), or fragments or variants thereof.

[0417] The Cas9 polypeptide of a fusion protein can comprise an amino acid sequence that is at least 85%, at least 90%, at least 91%, at least 92%, at least 93%, at least 94%, at least 95%, at least 96%, at least 97%, at least 98%, at least 99%, or at least 99.5% identical to a naturally-occurring Cas9 polypeptide.

[0418] The Cas9 polypeptide of a fusion protein can comprise an amino acid sequence that is at least 85%, at least 90%, at least 91%, at least 92%, at least 93%, at least 94%, at least 95%, at least 96%, at least 97%, at least 98%, at least 99%, or at least 99.5% identical to the Cas9 amino acid sequence set forth below (called the “Cas9 reference sequence” below):

MDKKYSIGLDIGTNSVGWAVITDEYKVPSKKFKVLGNTDRHSIKKNLIGALLFDSGETAEAT
RLKRTARRRYTRRKNRICYLQEIFSNEMAKVDDSFFHRLEESFLVEEDKKHERHPIFGNIVD
EVAYHEKYPTIYHLRKKLVDSTDKADLRLIYLALAHMIKFRGHFLIEGDLNPDNSDVDKLFI
QLVQTYNQLFEENPINASGVDAKAILSARLSKSRRLENLIAQLPGEKKNGLFGNLIALSLGL
TPNFKSNFDLAEDAKLQLSKDTYDDDLDNLLAQIGDQYADLFLAAKNLSDAILLSDILRVNT
EITKAPLSASMIKRYDEHHQDLTLLKALVRQQLPEKYKEIFFDQSKNGYAGYIDGGASQEEF
YKFIKPILEKMDGTEELLVKLNREDLLRKQRTFDNGSIPHQIHLGELHAILRRQEDFYPFLK
DNREKIEKILTFRIPYYVGPLARGNSRFAWMTRKSEETITPWNFEEVVDKGASAQSFIERMT
NFDKNLPNEKVLPKHSLLYEYFTVYNELTKVKYVTEGMRKPAFLSGEQKKAIVDLLFKTNRK
VTVKQLKEDYFKKIECFDSVEISGVEDRFNASLGTYHDLLKIIKDKDFLDNEENEDILEDIV
LTLTLFEDREMIEERLKTYAHLFDDKVMKQLKRRRYTGWGRLSRKLINGIRDKQSGKTILDF
LKSDGFANRNFMQLIHDDSLTFKEDIQKAQVSGQGDSLHEHIANLAGSPAIKKGILQTVKVV
DELVKVMGRHKPENIVIEMARENQTTQKGQKNSRERMKRIEEGIKELGSQILKEHPVENTQL
QNEKLYLYYLQNGRDMYVDQELDINRLSDYDVDHIVPQSFLKDDSIDNKVLTRSDKNRGKSD
NVPSEEVVKKMKNYWRQLLNAKLITQRKFDNLTKAERGGLSELDKAGFIKRQLVETRQITKH
VAQILDSRMNTKYDENDKLIREVKVITLKSKLVSDFRKDFQFYKVREINNYHHAHDAYLNAV
VGTALIKKYPKLESEFVYGDYKVYDVRKMIAKSEQEIGKATAKYFFYSNIMNFFKTEITLAN
GEIRKRPLIETNGETGEIVWDKGRDFATVRKVLSMPQVNIVKKTEVQTGGFSKESILPKRNS
DKLIARKKDWDPKKYGGFDSPTVAYSVLVVAKVEKGKSKKLKSVKELLGITIMERSSFEKNP
IDFLEAKGYKEVKKDLIIKLPKYSLFELENGRKRMLASAGELQKGNELALPSKYVNFLYLAS
HYEKLKGSPEDNEQKQLFVEQHKHYLDEIIEQISEFSKRVILADANLDKVLSAYNKHRDKPI
REQAENIIHLFTLTNLGAPAAFKYFDTTIDRKRYTSTKEVLDATLIHQSITGLYETRIDLSQ
LGGD (single underline: HNH domain;
double underline: RuvC domain).

[0419] Fusion proteins comprising a heterologous catalytic domain flanked by N- and C-terminal fragments of a Cas9 polypeptide are also useful for base editing in the methods as described herein. Fusion proteins comprising Cas9 and one or more deaminase domains, e.g., adenosine deaminase, or comprising an adenosine deaminase domain flanked by Cas9 sequences are also useful for highly specific and efficient base editing of target sequences. In an embodiment, a chimeric Cas9 fusion protein contains a heterologous catalytic domain (e.g., adenosine deaminase, cytidine deaminase, or adenosine deaminase and cytidine deaminase) inserted within a Cas9 polypeptide. In some embodiments, the fusion protein comprises an adenosine deaminase domain and a cytidine deaminase domain inserted within a Cas9. In some embodiments, an adenosine deaminase is fused within a Cas9 and a cytidine deaminase is fused to the C-terminus. In some embodiments, an adenosine deaminase is fused within Cas9 and a cytidine deaminase fused to the N-terminus. In some embodiments, a cytidine deaminase is fused within Cas9 and an adenosine deaminase is fused to the C-terminus. In some embodiments, a cytidine deaminase is fused within Cas9 and an adenosine deaminase fused to the N-terminus.

[0420] Exemplary structures of a fusion protein with an adenosine deaminase and a cytidine deaminase and a Cas9 are provided as follows:

[0421] NH₂-[Cas9(adenosine deaminase)]-[cytidine deaminase]-COOH;

[0422] NH₂-[cytidine deaminase]-[Cas9(adenosine deaminase)]-COOH;

[0423] NH₂-[Cas9(cytidine deaminase)]-[adenosine deaminase]-COOH; or

[0424] NH₂-[adenosine deaminase]-[Cas9(cytidine deaminase)]-COOH.

[0425] In some embodiments, the “-” used in the general architecture above indicates the presence of an optional linker.

[0426] In various embodiments, the catalytic domain has DNA modifying activity (e.g., deaminase activity), such as adenosine deaminase activity. In some embodiments, the adenosine deaminase is a TadA (e.g., TadA7.10). In some embodiments, the TadA is a TadA*8. In some embodiments, a TadA*8 is fused within Cas9 and a cytidine deaminase is fused to the C-terminus. In some embodiments, a TadA*8 is fused within Cas9 and a cytidine deaminase fused to the N-terminus. In some embodiments, a cytidine deaminase is fused within Cas9 and a TadA*8 is fused to the C-terminus. In some embodiments, a cytidine deaminase is fused within Cas9 and a TadA*8 fused to the N-terminus. Exemplary structures of a fusion protein with a TadA*8 and a cytidine deaminase and a Cas9 are provided as follows:

[0427] NH₂-[Cas9(TadA*8)]-[cytidine deaminase]-COOH;

[0428] NH₂-[cytidine deaminase]-[Cas9(TadA*8)]-COOH;

[0429] NH₂-[Cas9(cytidine deaminase)]-[TadA*8]-COOH; or

[0430] NH₂-[TadA*8]-[Cas9(cytidine deaminase)]-COOH.

In some embodiments, the “-” used in the general architecture above indicates the presence of an optional linker.

[0431] The heterologous polypeptide (e.g., deaminase) can be inserted in the napDNAbp (e.g., Cas9 or Cas12 (e.g., Cas12b/C2c1)) at a suitable location, for example, such that the napDNAbp retains its ability to bind the target polynucleotide and a guide nucleic acid. A deaminase (e.g., adenosine deaminase, cytidine deaminase, or adenosine deaminase and cytidine deaminase) can be inserted into a napDNAbp without compromising function of the deaminase (e.g., base editing activity) or the napDNAbp (e.g., ability to bind to target nucleic acid and guide nucleic acid). A deaminase (e.g., adenosine deaminase, cytidine deaminase, or adenosine deaminase and cytidine deaminase) can be inserted in the napDNAbp at, for example, a disordered region or a region comprising a high temperature factor or B-factor as shown by crystallographic studies. Regions of a protein that are less ordered, disordered, or unstructured, for example solvent exposed regions and loops, can be used for insertion without compromising structure or function. A deaminase (e.g., adenosine deaminase, cytidine deaminase, or adenosine deaminase and cytidine deaminase) can be inserted in the napDNAbp in a flexible loop region or a solvent-exposed region. In some embodiments, the deaminase (e.g., adenosine deaminase, cytidine deaminase, or adenosine deaminase and cytidine deaminase) is inserted in a flexible loop of the Cas9 or the Cas12b/C2c1 polypeptide.

[0432] In some embodiments, the insertion location of a deaminase (e.g., adenosine deaminase, cytidine deaminase, or adenosine deaminase and cytidine deaminase) is determined by B-factor analysis of the crystal structure of Cas9 polypeptide. In some embodiments, the deaminase (e.g., adenosine deaminase, cytidine deaminase, or adenosine deaminase and cytidine deaminase) is inserted in regions of the Cas9 polypeptide comprising higher than average B-factors (e.g., higher B factors compared to the total protein or the protein domain comprising the disordered region). B-factor or temperature factor can indicate the fluctuation of atoms from their average position (for example, as a result of temperature-dependent atomic vibrations or static disorder in a crystal lattice). A high B-factor (e.g., higher than average B-factor) for backbone atoms can be indicative of a region with relatively high local mobility. Such a region can be used for inserting a deaminase without compromising structure or function. A deaminase (e.g., adenosine deaminase, cytidine deaminase, or adenosine deaminase and cytidine deaminase) can be inserted at a location with a residue having a Ca atom with a B-factor that is 50%, 60%, 70%, 80%, 90%, 100%, 110%, 120%, 130%, 140%, 150%, 160%, 170%, 180%, 190%, 200%, or greater than 200% more than the average B-factor for the total protein. A deaminase (e.g., adenosine deaminase, cytidine deaminase, or adenosine deaminase and cytidine deaminase) can be inserted at a location with a residue having a Ca atom with a B-factor that is 50%, 60%, 70%, 80%, 90%, 100%, 110%, 120%, 130%, 140%, 150%, 160%, 170%, 180%, 190%, 200% or greater than 200% more than the average B-factor for a Cas9 protein domain comprising the residue. Cas9 polypeptide positions comprising a higher than average B-factor can include, for example, residues 768, 792, 1052, 1015, 1022, 1026, 1029, 1067, 1040, 1054, 1068, 1246, 1247, and 1248 as numbered in the above Cas9 reference sequence. Cas9 polypeptide regions comprising a higher than average B-factor can include, for example, residues 792-872, 792-906, and 2-791 as numbered in the above Cas9 reference sequence.

[0433] A heterologous polypeptide (e.g., deaminase) can be inserted in the napDNAbp at an amino acid residue selected from the group consisting of: 768, 791, 792, 1015, 1016, 1022, 1023, 1026, 1029, 1040, 1052, 1054, 1067, 1068, 1069, 1246, 1247, and 1248 as numbered in the above Cas9 reference sequence, or a corresponding amino acid residue in another Cas9 polypeptide. In some embodiments, the heterologous polypeptide is inserted between amino acid positions 768-769, 791-792, 792-793, 1015-1016, 1022-1023, 1026-1027, 1029-1030, 1040-1041, 1052-1053, 1054-1055, 1067-1068, 1068-1069, 1247-1248, or 1248-1249 as numbered in the above Cas9 reference sequence or corresponding amino acid positions thereof. In some embodiments, the heterologous polypeptide is inserted between amino acid positions 769-770, 792-793, 793-794, 1016-1017, 1023-1024, 1027-1028, 1030-1031, 1041-1042, 1053-1054, 1055-1056, 1068-1069, 1069-1070, 1248-1249, or 1249-1250 as numbered in the above Cas9 reference sequence or corresponding amino acid positions thereof. In some embodiments, the heterologous polypeptide replaces an amino acid residue selected from the group consisting of: 768, 791, 792, 1015, 1016, 1022, 1023, 1026, 1029, 1040, 1052, 1054, 1067, 1068, 1069, 1246, 1247, and 1248 as numbered in the above Cas9 reference sequence, or a corresponding amino acid residue in another Cas9 polypeptide. It should be understood that the reference to the above Cas9 reference sequence with respect to insertion positions is for illustrative purposes. The insertions as discussed herein are not limited to the Cas9 polypeptide sequence of the above Cas9 reference sequence, but include insertion at corresponding locations in variant Cas9 polypeptides, for example a Cas9 nickase (nCas9), nuclease dead Cas9 (dCas9), a Cas9 variant lacking a nuclease domain, a truncated Cas9, or a Cas9 domain lacking partial or complete HNH domain.

[0434] A heterologous polypeptide (e.g., deaminase) can be inserted in the napDNAbp at an amino acid residue selected from the group consisting of: 768, 792, 1022, 1026, 1040, 1068, and 1247 as numbered in the above Cas9 reference sequence, or a corresponding amino acid residue in another Cas9 polypeptide. In some embodiments, the heterologous polypeptide is inserted between amino acid positions 768-769, 792-793, 1022-1023, 1026-1027, 1029-1030, 1040-1041, 1068-1069, or 1247-1248 as numbered in the above Cas9 reference sequence or corresponding amino acid positions thereof. In some embodiments, the heterologous polypeptide is inserted between amino acid positions 769-770, 793-794, 1023-1024, 1027-1028, 1030-1031, 1041-1042, 1069-1070, or 1248-1249 as numbered in the above Cas9 reference sequence or corresponding amino acid positions thereof. In some embodiments, the heterologous polypeptide replaces an amino acid residue selected from the group consisting of: 768, 792, 1022, 1026, 1040, 1068, and 1247 as numbered in the above Cas9 reference sequence, or a corresponding amino acid residue in another Cas9 polypeptide.

[0435] A heterologous polypeptide (e.g., deaminase) can be inserted in the napDNAbp at an amino acid residue as described herein, or a corresponding amino acid residue in another Cas9 polypeptide. In an embodiment, a heterologous polypeptide (e.g., deaminase) can be inserted in the napDNAbp at an amino acid residue selected from the group consisting of: 1002, 1003, 1025, 1052-1056, 1242-1247, 1061-1077, 943-947, 686-691, 569-578, 530-539, and 1060-1077 as numbered in the above Cas9 reference sequence, or a corresponding amino acid residue in another Cas9 polypeptide. The deaminase (e.g., adenosine deaminase, cytidine deaminase, or adenosine deaminase and cytidine deaminase) can be inserted at the N-terminus or the C-terminus of the residue or replace the residue. In some embodiments, the deaminase (e.g., adenosine deaminase, cytidine deaminase, or adenosine deaminase and cytidine deaminase) is inserted at the C-terminus of the residue.

[0436] In some embodiments, an adenosine deaminase (e.g., TadA) is inserted at an amino acid residue selected from the group consisting of: 1015, 1022, 1029, 1040, 1068, 1247, 1054, 1026, 768, 1067, 1248, 1052, and 1246 as numbered in the above Cas9 reference sequence, or a corresponding amino acid residue in another Cas9 polypeptide. In some embodiments, an adenosine deaminase (e.g., TadA) is inserted in place of residues 792-872, 792-906, or 2-791 as numbered in the above Cas9 reference sequence, or a corresponding amino acid residue in another Cas9 polypeptide. In some embodiments, the adenosine deaminase is inserted at the N-terminus of an amino acid selected from the group consisting of: 1015, 1022, 1029, 1040, 1068, 1247, 1054, 1026, 768, 1067, 1248, 1052, and 1246 as numbered in the above Cas9 reference sequence, or a corresponding amino acid residue in another Cas9 polypeptide. In some embodiments, the adenosine deaminase is inserted at the C-terminus of an amino acid selected from the group consisting of: 1015, 1022, 1029, 1040, 1068, 1247, 1054, 1026, 768, 1067, 1248, 1052, and 1246 as numbered in the above Cas9 reference sequence, or a corresponding amino acid residue in another Cas9 polypeptide. In some embodiments, the adenosine deaminase is inserted to replace an amino acid selected from the group consisting of: 1015, 1022, 1029, 1040, 1068, 1247, 1054, 1026, 768, 1067, 1248, 1052, and 1246 as numbered in the above Cas9 reference sequence, or a corresponding amino acid residue in another Cas9 polypeptide.

[0437] In some embodiments, a CBE (e.g., APOBEC1) is inserted at an amino acid residue selected from the group consisting of: 1016, 1023, 1029, 1040, 1069, and 1247 as numbered in the above Cas9 reference sequence, or a corresponding amino acid residue in another Cas9 polypeptide. In some embodiments, the ABE is inserted at the N-terminus of an amino acid selected from the group consisting of: 1016, 1023, 1029, 1040, 1069, and 1247 as numbered in the above Cas9 reference sequence, or a corresponding amino acid residue in another Cas9 polypeptide. In some embodiments, the ABE is inserted at the C-terminus of an amino acid selected from the group consisting of: 1016, 1023, 1029, 1040, 1069, and 1247 as numbered in the above Cas9 reference sequence, or a corresponding amino acid residue in another Cas9 polypeptide. In some embodiments, the ABE is inserted to replace an amino acid selected from the group consisting of: 1016, 1023, 1029, 1040, 1069, and 1247 as numbered in the above Cas9 reference sequence, or a corresponding amino acid residue in another Cas9 polypeptide.

[0438] In some embodiments, the deaminase (e.g., adenosine deaminase, cytidine deaminase, or adenosine deaminase and cytidine deaminase) is inserted at amino acid residue 768 as numbered in the above Cas9 reference sequence, or a corresponding amino acid residue in another Cas9 polypeptide. In some embodiments, the deaminase (e.g., adenosine deaminase, cytidine deaminase, or adenosine deaminase and cytidine deaminase) is inserted at the N-terminus of amino acid residue 768 as numbered in the above Cas9 reference sequence, or a corresponding amino acid residue in another Cas9 polypeptide. In some embodiments, the deaminase (e.g., adenosine deaminase, cytidine deaminase, or adenosine deaminase and cytidine deaminase) is inserted at the C-terminus of amino acid residue 768 as numbered in the above Cas9 reference sequence, or a corresponding amino acid residue in another Cas9 polypeptide. In some embodiments, the deaminase (e.g., adenosine deaminase, cytidine deaminase, or adenosine deaminase and cytidine deaminase) is inserted to replace amino acid residue 768 as numbered in the above Cas9 reference sequence, or a corresponding amino acid residue in another Cas9 polypeptide.

[0439] In some embodiments, the deaminase (e.g., adenosine deaminase, cytidine deaminase, or adenosine deaminase and cytidine deaminase) is inserted at amino acid residue 791 or is inserted at amino acid residue 792, as numbered in the above Cas9 reference sequence, or a corresponding amino acid residue in another Cas9 polypeptide. In some embodiments, the deaminase (e.g., adenosine deaminase, cytidine deaminase, or adenosine deaminase and cytidine deaminase) is inserted at the N-terminus of amino acid residue 791 or is inserted at the N-terminus of amino acid 792, as numbered in the above Cas9 reference sequence, or a corresponding amino acid residue in another Cas9 polypeptide. In some embodiments, the deaminase (e.g., adenosine deaminase, cytidine deaminase, or adenosine deaminase and cytidine deaminase) is inserted at the C-terminus of amino acid 791 or is inserted at the N-terminus of amino acid 792, as numbered in the above Cas9 reference sequence, or a corresponding amino acid residue in another Cas9 polypeptide. In some embodiments, the deaminase (e.g., adenosine deaminase, cytidine deaminase, or adenosine deaminase and cytidine deaminase) is inserted to replace amino acid 791, or is inserted to replace amino acid 792, as numbered in the above Cas9 reference sequence, or a corresponding amino acid residue in another Cas9 polypeptide.

[0440] In some embodiments, the deaminase (e.g., adenosine deaminase, cytidine deaminase, or adenosine deaminase and cytidine deaminase) is inserted at amino acid residue 1016 as numbered in the above Cas9 reference sequence, or a corresponding amino acid residue in another Cas9 polypeptide. In some embodiments, the deaminase (e.g., adenosine deaminase, cytidine deaminase, or adenosine deaminase and cytidine deaminase) is inserted at the N-terminus of amino acid residue 1016 as numbered in the above Cas9 reference sequence, or a corresponding amino acid residue in another Cas9 polypeptide. In some embodiments, the deaminase (e.g., adenosine deaminase, cytidine deaminase, or adenosine deaminase and cytidine deaminase) is inserted at the C-terminus of amino acid residue 1016 as numbered in the above Cas9 reference sequence, or a corresponding amino acid residue in another Cas9 polypeptide. In some embodiments, the deaminase (e.g., adenosine deaminase, cytidine deaminase, or adenosine deaminase and cytidine deaminase) is inserted to replace amino acid residue 1016 as numbered in the above Cas9 reference sequence, or a corresponding amino acid residue in another Cas9 polypeptide.

[0441] In some embodiments, the deaminase (e.g., adenosine deaminase, cytidine deaminase, or adenosine deaminase and cytidine deaminase) is inserted at amino acid residue 1022, or is inserted at amino acid residue 1023, as numbered in the above Cas9 reference sequence, or a corresponding amino acid residue in another Cas9 polypeptide. In some embodiments, the deaminase (e.g., adenosine deaminase, cytidine deaminase, or adenosine deaminase and cytidine deaminase) is inserted at the N-terminus of amino acid residue 1022 or is inserted at the N-terminus of amino acid residue 1023, as numbered in the above Cas9 reference sequence, or a corresponding amino acid residue in another Cas9 polypeptide. In some embodiments, the deaminase (e.g., adenosine deaminase, cytidine deaminase, or adenosine deaminase and cytidine deaminase) is inserted at the C-terminus of amino acid residue 1022 or is inserted at the C-terminus of amino acid residue 1023, as numbered in the above Cas9 reference sequence, or a corresponding amino acid residue in another Cas9 polypeptide. In some embodiments, the deaminase (e.g., adenosine deaminase, cytidine deaminase, or adenosine deaminase and cytidine deaminase) is inserted to replace amino acid residue 1022, or is inserted to replace amino acid residue 1023, as numbered in the above Cas9 reference sequence, or a corresponding amino acid residue in another Cas9 polypeptide.

[0442] In some embodiments, the deaminase (e.g., adenosine deaminase, cytidine deaminase, or adenosine deaminase and cytidine deaminase) is inserted at amino acid residue 1026, or is inserted at amino acid residue 1029, as numbered in the above Cas9 reference sequence, or a corresponding amino acid residue in another Cas9 polypeptide. In some embodiments, the deaminase (e.g., adenosine deaminase, cytidine deaminase, or adenosine deaminase and cytidine deaminase) is inserted at the N-terminus of amino acid residue 1026 or is inserted at the N-terminus of amino acid residue 1029, as numbered in the above Cas9 reference sequence, or a corresponding amino acid residue in another Cas9 polypeptide. In some embodiments, the deaminase (e.g., adenosine deaminase, cytidine deaminase, or adenosine deaminase and cytidine deaminase) is inserted at the C-terminus of amino acid residue 1026 or is inserted at the C-terminus of amino acid residue 1029, as numbered in the above Cas9 reference sequence, or a corresponding amino acid residue in another Cas9 polypeptide. In some embodiments, the deaminase (e.g., adenosine deaminase, cytidine deaminase, or adenosine deaminase and cytidine deaminase) is inserted to replace amino acid residue 1026, or is inserted to replace amino acid residue 1029, as numbered in the above Cas9 reference sequence, or corresponding amino acid residue in another Cas9 polypeptide.

[0443] In some embodiments, the deaminase (e.g., adenosine deaminase, cytidine deaminase, or adenosine deaminase and cytidine deaminase) is inserted at amino acid residue 1040 as numbered in the above Cas9 reference sequence, or a corresponding amino acid residue in another Cas9 polypeptide. In some embodiments, the deaminase (e.g., adenosine deaminase, cytidine deaminase, or adenosine deaminase and cytidine deaminase) is inserted at the N-terminus of amino acid residue 1040 as numbered in the above Cas9 reference sequence, or a corresponding amino acid residue in another Cas9 polypeptide. In some embodiments, the deaminase (e.g., adenosine deaminase, cytidine deaminase, or adenosine deaminase and cytidine deaminase) is inserted at the C-terminus of amino acid residue 1040 as numbered in the above Cas9 reference sequence, or a corresponding amino acid residue in another Cas9 polypeptide. In some embodiments, the deaminase (e.g., adenosine deaminase, cytidine deaminase, or adenosine deaminase and cytidine deaminase) is inserted to replace amino acid residue 1040 as numbered in the above Cas9 reference sequence, or a corresponding amino acid residue in another Cas9 polypeptide.

[0444] In some embodiments, the deaminase (e.g., adenosine deaminase, cytidine deaminase, or adenosine deaminase and cytidine deaminase) is inserted at amino acid residue 1052, or is inserted at amino acid residue 1054, as numbered in the above Cas9 reference sequence, or a corresponding amino acid residue in another Cas9 polypeptide. In some embodiments, the deaminase (e.g., adenosine deaminase, cytidine deaminase, or adenosine deaminase and cytidine deaminase) is inserted at the N-terminus of amino acid residue 1052 or is inserted at the N-terminus of amino acid residue 1054, as numbered in the above Cas9 reference sequence, or a corresponding amino acid residue in another Cas9 polypeptide. In some embodiments, the deaminase (e.g., adenosine deaminase, cytidine deaminase, or adenosine deaminase and cytidine deaminase) is inserted at the C-terminus of amino acid residue 1052 or is inserted at the C-terminus of amino acid residue 1054, as numbered in the above Cas9 reference sequence, or a corresponding amino acid residue in another Cas9 polypeptide. In some embodiments, the deaminase (e.g., adenosine deaminase, cytidine deaminase, or adenosine deaminase and cytidine deaminase) is inserted to replace amino acid residue 1052, or is inserted to replace amino acid residue 1054, as numbered in the above Cas9 reference sequence, or a corresponding amino acid residue in another Cas9 polypeptide.

[0445] In some embodiments, the deaminase (e.g., adenosine deaminase, cytidine deaminase, or adenosine deaminase and cytidine deaminase) is inserted at amino acid residue 1067, or is inserted at amino acid residue 1068, or is inserted at amino acid residue 1069, as numbered in the above Cas9 reference sequence, or a corresponding amino acid residue in another Cas9 polypeptide. In some embodiments, the deaminase (e.g., adenosine deaminase, cytidine deaminase, or adenosine deaminase and cytidine deaminase) is inserted at the N-terminus of amino acid residue 1067 or is inserted at the N-terminus of amino acid residue 1068 or is inserted at the N-terminus of amino acid residue 1069, as numbered in the above Cas9 reference sequence, or a corresponding amino acid residue in another Cas9 polypeptide. In some embodiments, the deaminase (e.g., adenosine deaminase, cytidine deaminase, or adenosine deaminase and cytidine deaminase) is inserted at the C-terminus of amino acid residue 1067 or is inserted at the C-terminus of amino acid residue 1068 or is inserted at the C-terminus of amino acid residue 1069, as numbered in the above Cas9 reference sequence, or a corresponding amino acid residue in another Cas9 polypeptide. In some embodiments, the deaminase (e.g., adenosine deaminase, cytidine deaminase, or adenosine deaminase and cytidine deaminase) is inserted to replace amino acid residue 1067, or is inserted to replace amino acid residue 1068, or is inserted to replace amino acid residue 1069, as numbered in the above Cas9 reference sequence, or a corresponding amino acid residue in another Cas9 polypeptide.

[0446] In some embodiments, the deaminase (e.g., adenosine deaminase, cytidine deaminase, or adenosine deaminase and cytidine deaminase) is inserted at amino acid residue 1246, or is inserted at amino acid residue 1247, or is inserted at amino acid residue 1248, as numbered in the above Cas9 reference sequence, or a corresponding amino acid residue in another Cas9 polypeptide. In some embodiments, the deaminase (e.g., adenosine deaminase, cytidine deaminase, or adenosine deaminase and cytidine deaminase) is inserted at the N-terminus of amino acid residue 1246 or is inserted at the N-terminus of amino acid residue 1247 or is inserted at the N-terminus of amino acid residue 1248, as numbered in the above Cas9 reference sequence, or a corresponding amino acid residue in another Cas9 polypeptide. In some embodiments, the deaminase (e.g., adenosine deaminase, cytidine deaminase, or adenosine deaminase and cytidine deaminase) is inserted at the C-terminus of amino acid residue 1246 or is inserted at the C-terminus of amino acid residue 1247 or is inserted at the C-terminus of amino acid residue 1248, as numbered in the above Cas9 reference sequence, or a corresponding amino acid residue in another Cas9 polypeptide. In some embodiments, the deaminase (e.g., adenosine deaminase, cytidine deaminase, or adenosine deaminase and cytidine deaminase) is inserted to replace amino acid residue 1246, or is inserted to replace amino acid residue 1247, or is inserted to replace amino acid residue 1248, as numbered in the above Cas9 reference sequence, or a corresponding amino acid residue in another Cas9 polypeptide.

[0447] In some embodiments, a heterologous polypeptide (e.g., deaminase) is inserted in a flexible loop of a Cas9 polypeptide. The flexible loop portions can be selected from the group consisting of 530-537, 569-570, 686-691, 943-947, 1002-1025, 1052-1077, 1232-1247, or 1298-1300 as numbered in the above Cas9 reference sequence, or a corresponding amino acid residue in another Cas9 polypeptide. The flexible loop portions can be selected from the group consisting of: 1-529, 538-568, 580-685, 692-942, 948-1001, 1026-1051, 1078-1231, or 1248-1297 as numbered in the above Cas9 reference sequence, or a corresponding amino acid residue in another Cas9 polypeptide.

[0448] A heterologous polypeptide (e.g., adenine deaminase) can be inserted into a Cas9 polypeptide region corresponding to amino acid residues: 1017-1069, 1242-1247, 1052-1056, 1060-1077, 1002-1003, 943-947, 530-537, 568-579, 686-691, 1242-1247, 1298-1300, 1066-1077, 1052-1056, or 1060-1077 as numbered in the above Cas9 reference sequence, or a corresponding amino acid residue in another Cas9 polypeptide.

[0449] A heterologous polypeptide (e.g., adenine deaminase) can be inserted in place of a deleted region of a Cas9 polypeptide. The deleted region can correspond to an N-terminal or C-terminal portion of the Cas9 polypeptide. In some embodiments, the deleted region corresponds to residues 792-872 as numbered in the above Cas9 reference sequence, or a corresponding amino acid residue in another Cas9 polypeptide. In some embodiments, the deleted region corresponds to residues 792-906 as numbered in the above Cas9 reference sequence, or a corresponding amino acid residue in another Cas9 polypeptide. In some embodiments, the deleted region corresponds to residues 2-791 as numbered in the above Cas9 reference sequence, or a corresponding amino acid residue in another Cas9 polypeptide. In some embodiments, the deleted region corresponds to residues 1017-1069 as numbered in the above Cas9 reference sequence, or corresponding amino acid residues thereof.

[0450] Exemplary internal fusions base editors are provided in Table A below:

TABLE A
Insertion loci in Cas9 proteins

| BE ID | Modification | Other ID |
|---|---|---|
| IBE001 | Cas9 TadA ins 1015 | ISLAY01 |
| IBE002 | Cas9 TadA ins 1022 | ISLAY02 |
| IBE003 | Cas9 TadA ins 1029 | ISLAY03 |
| IBE004 | Cas9 TadA ins 1040 | ISLAY04 |
| IBE005 | Cas9 TadA ins 1068 | ISLAY05 |
| IBE006 | Cas9 TadA ins 1247 | ISLAY06 |
| IBE007 | Cas9 TadA ins 1054 | ISLAY07 |
| IBE008 | Cas9 TadA ins 1026 | ISLAY08 |
| IBE009 | Cas9 TadA ins 768 | ISLAY09 |
| IBE020 | delta HNH TadA 792 | ISLAY20 |
| IBE021 | N-term fusion single TadA helix truncated 165-end | ISLAY21 |
| IBE029 | TadA-Circular Permutant 116 ins 1067 | ISLAY29 |
| IBE031 | TadA-Circular Permutant 136 ins 1248 | ISLAY31 |
| IBE032 | TadA-Circular Permutant 136 ins 1052 | ISLAY32 |
| IBE035 | delta 792-872 TadA ins | ISLAY35 |
| IBE036 | delta 792-906 TadA ins | ISLAY36 |
| IBE043 | TadA-Circular Permutant 65 ins 1246 | ISLAY43 |
| IBE044 | TadA ins C-term truncate2 791 | ISLAY44 |

[0451] A heterologous polypeptide (e.g., deaminase) can be inserted within a structural or functional domain of a Cas9 polypeptide. A heterologous polypeptide (e.g., deaminase) can be inserted between two structural or functional domains of a Cas9 polypeptide. A heterologous polypeptide (e.g., deaminase) can be inserted in place of a structural or functional domain of a Cas9 polypeptide, for example, after deleting the domain from the Cas9 polypeptide. The structural or functional domains of a Cas9 polypeptide can include, for example, RuvC I, RuvC II, RuvC III, Rec1, Rec2, PI, or HNH.

[0452] In some embodiments, the Cas9 polypeptide lacks one or more domains selected from the group consisting of: RuvC I, RuvC II, RuvC III, Rec1, Rec2, PI, or HNH domain. In some embodiments, the Cas9 polypeptide lacks a nuclease domain. In some embodiments, the Cas9 polypeptide lacks an HNH domain. In some embodiments, the Cas9 polypeptide lacks a portion of the HNH domain such that the Cas9 polypeptide has reduced or abolished HNH activity. In some embodiments, the Cas9 polypeptide comprises a deletion of the nuclease domain, and the deaminase is inserted to replace the nuclease domain. In some embodiments, the HNH domain is deleted and the deaminase is inserted in its place. In some embodiments, one or more of the RuvC domains is deleted and the deaminase is inserted in its place.

[0453] A fusion protein comprising a heterologous polypeptide can be flanked by a N-terminal and a C-terminal fragment of a napDNAbp. In some embodiments, the fusion protein comprises a deaminase flanked by a N-terminal fragment and a C-terminal fragment of a Cas9 polypeptide. The N terminal fragment or the C terminal fragment can bind the target polynucleotide sequence. The C-terminus of the N terminal fragment or the N-terminus of the C terminal fragment can comprise a part of a flexible loop of a Cas9 polypeptide. The C-terminus of the N terminal fragment or the N-terminus of the C terminal fragment can comprise a part of an alpha-helix structure of the Cas9 polypeptide. The N-terminal fragment or the C-terminal fragment can comprise a DNA binding domain. The N-terminal fragment or the C-terminal fragment can comprise a RuvC domain. The N-terminal fragment or the C-terminal fragment can comprise an HNH domain. In some embodiments, neither of the N-terminal fragment and the C-terminal fragment comprises an HNH domain.

[0454] In some embodiments, the C-terminus of the N terminal Cas9 fragment comprises an amino acid that is in proximity to a target nucleobase when the fusion protein deaminates the target nucleobase. In some embodiments, the N-terminus of the C terminal Cas9 fragment comprises an amino acid that is in proximity to a target nucleobase when the fusion protein deaminates the target nucleobase. The insertion location of different deaminases can be different in order to have proximity between the target nucleobase and an amino acid in the C-terminus of the N terminal Cas9 fragment or the N-terminus of the C terminal Cas9 fragment. For example, the insertion position of an ABE can be at an amino acid residue selected from the group consisting of: 1015, 1022, 1029, 1040, 1068, 1247, 1054, 1026, 768, 1067, 1248, 1052, and 1246 as numbered in the above Cas9 reference sequence, or a corresponding amino acid residue in another Cas9 polypeptide.

[0455] The N-terminal Cas9 fragment of a fusion protein (i.e. the N-terminal Cas9 fragment flanking the deaminase in a fusion protein) can comprise the N-terminus of a Cas9 polypeptide. The N-terminal Cas9 fragment of a fusion protein can comprise a length of at least about: 100, 200, 300, 400, 500, 600, 700, 800, 900, 1000, 1100, 1200, or 1300 amino acids. The N-terminal Cas9 fragment of a fusion protein can comprise a sequence corresponding to amino acid residues: 1-56, 1-95, 1-200, 1-300, 1-400, 1-500, 1-600, 1-700, 1-718, 1-765, 1-780, 1-906, 1-918, or 1-1100 as numbered in the above Cas9 reference sequence, or a corresponding amino acid residue in another Cas9 polypeptide. The N-terminal Cas9 fragment can comprise a sequence comprising at least: 85%, at least 90%, at least 91%, at least 92%, at least 93%, at least 94%, at least 95%, at least 96%, at least 97%, at least 98%, at least 99%, or at least 99.5% sequence identity to amino acid residues: 1-56, 1-95, 1-200, 1-300, 1-400, 1-500, 1-600, 1-700, 1-718, 1-765, 1-780, 1-906, 1-918, or 1-1100 as numbered in the above Cas9 reference sequence, or a corresponding amino acid residue in another Cas9 polypeptide.

[0456] The C-terminal Cas9 fragment of a fusion protein (i.e. the C-terminal Cas9 fragment flanking the deaminase in a fusion protein) can comprise the C-terminus of a Cas9 polypeptide. The C-terminal Cas9 fragment of a fusion protein can comprise a length of at least about: 100, 200, 300, 400, 500, 600, 700, 800, 900, 1000, 1100, 1200, or 1300 amino acids. The C-terminal Cas9 fragment of a fusion protein can comprise a sequence corresponding to amino acid residues: 1099-1368, 918-1368, 906-1368, 780-1368, 765-1368, 718-1368, 94-1368, or 56-1368 as numbered in the above Cas9 reference sequence, or a corresponding amino acid residue in another Cas9 polypeptide. The N-terminal Cas9 fragment can comprise a sequence comprising at least: 85%, at least 90%, at least 91%, at least 92%, at least 93%, at least 94%, at least 95%, at least 96%, at least 97%, at least 98%, at least 99%, or at least 99.5% sequence identity to amino acid residues: 1099-1368, 918-1368, 906-1368, 780-1368, 765-1368, 718-1368, 94-1368, or 56-1368 as numbered in the above Cas9 reference sequence, or a corresponding amino acid residue in another Cas9 polypeptide.

[0457] The N-terminal Cas9 fragment and C-terminal Cas9 fragment of a fusion protein taken together may not correspond to a full-length naturally occurring Cas9 polypeptide sequence, for example, as set forth in the above Cas9 reference sequence.

[0458] The fusion protein described herein can effect targeted deamination with reduced deamination at non-target sites (e.g., off-target sites), such as reduced genome wide spurious deamination. The fusion protein described herein can effect targeted deamination with reduced bystander deamination at non-target sites. The undesired deamination or off-target deamination can be reduced by at least 30%, at least 40%, at least 50%, at least 60%, at least 70%, at least 80%, at least 90%, at least 95%, or at least 99% compared with, for example, an end terminus fusion protein comprising the deaminase fused to a N terminus or a C terminus of a Cas9 polypeptide. The undesired deamination or off-target deamination can be reduced by at least one-fold, at least two-fold, at least three-fold, at least four-fold, at least five-fold, at least tenfold, at least fifteen fold, at least twenty fold, at least thirty fold, at least forty fold, at least fifty fold, at least 60 fold, at least 70 fold, at least 80 fold, at least 90 fold, or at least hundred fold, compared with, for example, an end terminus fusion protein comprising the deaminase fused to a N terminus or a C terminus of a Cas9 polypeptide.

[0459] In some embodiments, the deaminase (e.g., adenosine deaminase, cytidine deaminase, or adenosine deaminase and cytidine deaminase) of the fusion protein deaminates no more than two nucleobases within the range of an R-loop. In some embodiments, the deaminase of the fusion protein deaminates no more than three nucleobases within the range of the R-loop. In some embodiments, the deaminase of the fusion protein deaminates no more than 2, 3, 4, 5, 6, 7, 8, 9, or 10 nucleobases within the range of the R-loop. An R-loop is a three-stranded nucleic acid structure including a DNA:RNA hybrid, a DNA:DNA or an RNA: RNA complementary structure and the associated with single-stranded DNA. As used herein, an R-loop may be formed when a target polynucleotide is contacted with a CRISPR complex or a base editing complex, wherein a portion of a guide polynucleotide, e.g. a guide RNA, hybridizes with and displaces with a portion of a target polynucleotide, e.g. a target DNA. In some embodiments, an R-loop comprises a hybridized region of a spacer sequence and a target DNA complementary sequence. An R-loop region may be of about 5, 6, 7, 8, 9, 10, 11, 12, 13, 14, 15, 16, 17, 18, 19, 20, 21, 22, 23, 24, 25, 26, 27, 28, 29, 30, 31, 32, 33, 34, 35, 36, 37, 38, 39, 40, 41, 42, 43, 44, 45, 46, 47, 48, 49, or 50 nucleobase pairs in length. In some embodiments, the R-loop region is about 20 nucleobase pairs in length. It should be understood that, as used herein, an R-loop region is not limited to the target DNA strand that hybridizes with the guide polynucleotide. For example, editing of a target nucleobase within an R-loop region may be to a DNA strand that comprises the complementary strand to a guide RNA, or may be to a DNA strand that is the opposing strand of the strand complementary to the guide RNA. In some embodiments, editing in the region of the R-loop comprises editing a nucleobase on non-complementary strand (protospacer strand) to a guide RNA in a target DNA sequence.

[0460] The fusion protein described herein can effect target deamination in an editing window different from canonical base editing. In some embodiments, a target nucleobase is from about 1 to about 20 bases upstream of a PAM sequence in the target polynucleotide sequence. In some embodiments, a target nucleobase is from about 2 to about 12 bases upstream of a PAM sequence in the target polynucleotide sequence. In some embodiments, a target nucleobase is from about 1 to 9 base pairs, about 2 to 10 base pairs, about 3 to 11 base pairs, about 4 to 12 base pairs, about 5 to 13 base pairs, about 6 to 14 base pairs, about 7 to 15 base pairs, about 8 to 16 base pairs, about 9 to 17 base pairs, about 10 to 18 base pairs, about 11 to 19 base pairs, about 12 to 20 base pairs, about 1 to 7 base pairs, about 2 to 8 base pairs, about 3 to 9 base pairs, about 4 to 10 base pairs, about 5 to 11 base pairs, about 6 to 12 base pairs, about 7 to 13 base pairs, about 8 to 14 base pairs, about 9 to 15 base pairs, about 10 to 16 base pairs, about 11 to 17 base pairs, about 12 to 18 base pairs, about 13 to 19 base pairs, about 14 to 20 base pairs, about 1 to 5 base pairs, about 2 to 6 base pairs, about 3 to 7 base pairs, about 4 to 8 base pairs, about 5 to 9 base pairs, about 6 to 10 base pairs, about 7 to 11 base pairs, about 8 to 12 base pairs, about 9 to 13 base pairs, about 10 to 14 base pairs, about 11 to 15 base pairs, about 12 to 16 base pairs, about 13 to 17 base pairs, about 14 to 18 base pairs, about 15 to 19 base pairs, about 16 to 20 base pairs, about 1 to 3 base pairs, about 2 to 4 base pairs, about 3 to 5 base pairs, about 4 to 6 base pairs, about 5 to 7 base pairs, about 6 to 8 base pairs, about 7 to 9 base pairs, about 8 to 10 base pairs, about 9 to 11 base pairs, about 10 to 12 base pairs, about 11 to 13 base pairs, about 12 to 14 base pairs, about 13 to 15 base pairs, about 14 to 16 base pairs, about 15 to 17 base pairs, about 16 to 18 base pairs, about 17 to 19 base pairs, about 18 to 20 base pairs away or upstream of the PAM sequence. In some embodiments, a target nucleobase is about 1, 2, 3, 4, 5, 6, 7, 8, 9, 10, 11, 12, 13, 14, 15, 16, 17, 18, 19, 20, or more base pairs away from or upstream of the PAM sequence. In some embodiments, a target nucleobase is about 1, 2, 3, 4, 5, 6, 7, 8, or 9 base pairs upstream of the PAM sequence. In some embodiments, a target nucleobase is about 2, 3, 4, or 6 base pairs upstream of the PAM sequence.

[0461] The fusion protein can comprise more than one heterologous polypeptide. For example, the fusion protein can additionally comprise one or more UGI domains and/or one or more nuclear localization signals. The two or more heterologous domains can be inserted in tandem. The two or more heterologous domains can be inserted at locations such that they are not in tandem in the NapDNAbp.

[0462] A fusion protein can comprise a linker between the deaminase and the napDNAbp polypeptide. The linker can be a peptide or a non-peptide linker. For example, the linker can be an XTEN, (GGGS)n, (GGGGS)n, (G)n, (EAAAK)n, (GGS)n, SGSETPGTSESATPES. In some embodiments, the fusion protein comprises a linker between the N-terminal Cas9 fragment and the deaminase. In some embodiments, the fusion protein comprises a linker between the C-terminal Cas9 fragment and the deaminase. In some embodiments, the N-terminal and C-terminal fragments of napDNAbp are connected to the deaminase with a linker. In some embodiments, the N-terminal and C-terminal fragments are joined to the deaminase domain without a linker. In some embodiments, the fusion protein comprises a linker between the N-terminal Cas9 fragment and the deaminase, but does not comprise a linker between the C-terminal Cas9 fragment and the deaminase. In some embodiments, the fusion protein comprises a linker between the C-terminal Cas9 fragment and the deaminase, but does not comprise a linker between the N-terminal Cas9 fragment and the deaminase.

[0463] In some embodiments, the napDNAbp in the fusion protein is a Cas12 polypeptide, e.g., Cas12b/C2c1, or a fragment thereof. The Cas12 polypeptide can be a variant Cas12 polypeptide. In other embodiments, the N- or C-terminal fragments of the Cas12 polypeptide comprise a nucleic acid programmable DNA binding domain or a RuvC domain. In other embodiments, the fusion protein contains a linker between the Cas12 polypeptide and the catalytic domain. In other embodiments, the amino acid sequence of the linker is GGSGGS or GSSGSETPGTSESATPESSG. In other embodiments, the linker is a rigid linker. In other embodiments of the above aspects, the linker is encoded by GGAGGCTCTGGAGGAAGC or GGCTCITCTGGATCTGAAACACCIGGCACAAGCGAGAGCGCCACCCCTGAGAGCTCTGGC.

[0464] Fusion proteins comprising a heterologous catalytic domain flanked by N- and C-terminal fragments of a Cas12 polypeptide are also useful for base editing in the methods as described herein. Fusion proteins comprising Cas12 and one or more deaminase domains, e.g., adenosine deaminase, or comprising an adenosine deaminase domain flanked by Cas12 sequences are also useful for highly specific and efficient base editing of target sequences. In an embodiment, a chimeric Cas12 fusion protein contains a heterologous catalytic domain (e.g., adenosine deaminase, cytidine deaminase, or adenosine deaminase and cytidine deaminase) inserted within a Cas12 polypeptide. In some embodiments, the fusion protein comprises an adenosine deaminase domain and a cytidine deaminase domain inserted within a Cas12. In some embodiments, an adenosine deaminase is fused within Cas12 and a cytidine deaminase is fused to the C-terminus. In some embodiments, an adenosine deaminase is fused within Cas12 and a cytidine deaminase fused to the N-terminus. In some embodiments, a cytidine deaminase is fused within Cas12 and an adenosine deaminase is fused to the C-terminus. In some embodiments, a cytidine deaminase is fused within Cas12 and an adenosine deaminase fused to the N-terminus. Exemplary structures of a fusion protein with an adenosine deaminase and a cytidine deaminase and a Cas12 are provided as follows:

[0465] NH₂-[Cas12(adenosine deaminase)]-[cytidine deaminase]-COOH;

[0466] NH₂-[cytidine deaminase]-[Cas12(adenosine deaminase)]-COOH;

[0467] NH₂-[Cas12(cytidine deaminase)]-[adenosine deaminase]-COOH; or

[0468] NH₂-[adenosine deaminase]-[Cas12(cytidine deaminase)]-COOH;

In some embodiments, the “-” used in the general architecture above indicates the presence of an optional linker.

[0469] In various embodiments, the catalytic domain has DNA modifying activity (e.g., deaminase activity), such as adenosine deaminase activity. In some embodiments, the adenosine deaminase is a TadA (e.g., TadA7.10). In some embodiments, the TadA is a TadA*8. In some embodiments, a TadA*8 is fused within Cas12 and a cytidine deaminase is fused to the C-terminus. In some embodiments, a TadA*8 is fused within Cas12 and a cytidine deaminase fused to the N-terminus. In some embodiments, a cytidine deaminase is fused within Cas12 and a TadA*8 is fused to the C-terminus. In some embodiments, a cytidine deaminase is fused within Cas12 and a TadA*8 fused to the N-terminus. Exemplary structures of a fusion protein with a TadA*8 and a cytidine deaminase and a Cas12 are provided as follows:

[0470] N-[Cas12(TadA*8)]-[cytidine deaminase]-C;

[0471] N-[cytidine deaminase]-[Cas12(TadA*8)]-C;

[0472] N-[Cas12(cytidine deaminase)]-[TadA*8]-C; or

[0473] N-[TadA*8]-[Cas12(cytidine deaminase)]-C.

In some embodiments, the “-” used in the general architecture above indicates the presence of an optional linker.

[0474] In other embodiments, the fusion protein contains one or more catalytic domains. In other embodiments, at least one of the one or more catalytic domains is inserted within the Cas12 polypeptide or is fused at the Cas12 N-terminus or C-terminus. In other embodiments, at least one of the one or more catalytic domains is inserted within a loop, an alpha helix region, an unstructured portion, or a solvent accessible portion of the Cas12 polypeptide. In other embodiments, the Cas12 polypeptide is Cas12a, Cas12b, Cas12c, Cas12d, Cas12e, Cas12g, Cas12h, or Cas12i. In other embodiments, the Cas12 polypeptide has at least about 85% amino acid sequence identity to Bacillus hisashii Cas12b, Bacillus thermoamylovorans Cas12b, Bacillus sp. V3-13 Cas12b, or Alicyclobacillus acidiphilus Cas12b. In other embodiments, the Cas12 polypeptide has at least about 90% amino acid sequence identity to Bacillus hisashii Cas12b, Bacillus thermoamylovorans Cas12b, Bacillus sp. V3-13 Cas12b, or Alicyclobacillus acidiphilus Cas12b. In other embodiments, the Cas12 polypeptide has at least about 95% amino acid sequence identity to Bacillus hisashii Cas12b, Bacillus thermoamylovorans Cas12b, Bacillus sp. V3-13 Cas12b, or Alicyclobacillus acidiphilus Cas12b. In other embodiments, the Cas12 polypeptide contains or consists essentially of a fragment of Bacillus hisashii Cas12b, Bacillus thermoamylovorans Cas12b, Bacillus sp. V3-13 Cas12b, or Alicyclobacillus acidiphilus Cas12b.

[0475] In other embodiments, the catalytic domain is inserted between amino acid positions 153-154, 255-256, 306-307, 980-981, 1019-1020, 534-535, 604-605, or 344-345 of BhCas12b or a corresponding amino acid residue of Cas12a, Cas12c, Cas12d, Cas12e, Cas12g, Cas12h, or Cas12i. In other embodiments, the catalytic domain is inserted between amino acids P153 and S154 of BhCas12b. In other embodiments, the catalytic domain is inserted between amino acids K255 and E256 of BhCas12b. In other embodiments, the catalytic domain is inserted between amino acids D980 and G981 of BhCas12b. In other embodiments, the catalytic domain is inserted between amino acids K1019 and L1020 of BhCas12b. In other embodiments, the catalytic domain is inserted between amino acids F534 and P535 of BhCas12b. In other embodiments, the catalytic domain is inserted between amino acids K604 and G605 of BhCas12b. In other embodiments, the catalytic domain is inserted between amino acids H344 and F345 of BhCas12b. In other embodiments, catalytic domain is inserted between amino acid positions 147 and 148, 248 and 249, 299 and 300, 991 and 992, or 1031 and 1032 of BvCas12b or a corresponding amino acid residue of Cas12a, Cas12c, Cas12d, Cas12e, Cas12g, Cas12h, or Cas12i. In other embodiments, the catalytic domain is inserted between amino acids P147 and D148 of BvCas12b. In other embodiments, the catalytic domain is inserted between amino acids G248 and G249 of BvCas12b. In other embodiments, the catalytic domain is inserted between amino acids P299 and E300 of BvCas12b. In other embodiments, the catalytic domain is inserted between amino acids G991 and E992 of BvCas12b. In other embodiments, the catalytic domain is inserted between amino acids K1031 and M1032 of BvCas12b. In other embodiments, the catalytic domain is inserted between amino acid positions 157 and 158, 258 and 259, 310 and 311, 1008 and 1009, or 1044 and 1045 of AaCas12b or a corresponding amino acid residue of Cas12a, Cas12c, Cas12d, Cas12e, Cas12g, Cas12h, or Cas12i. In other embodiments, the catalytic domain is inserted between amino acids P157 and G158 of AaCas12b. In other embodiments, the catalytic domain is inserted between amino acids V258 and G259 of AaCas12b. In other embodiments, the catalytic domain is inserted between amino acids D310 and P311 of AaCas12b. In other embodiments, the catalytic domain is inserted between amino acids G1008 and E1009 of AaCas12b. In other embodiments, the catalytic domain is inserted between amino acids G1044 and K1045 at of AaCas12b.

[0476] In other embodiments, the fusion protein contains a nuclear localization signal (e.g., a bipartite nuclear localization signal). In other embodiments, the amino acid sequence of the nuclear localization signal is MAPKKKRKVGIHGVPAA. In other embodiments of the above aspects, the nuclear localization signal is encoded by the following sequence: ATGGCCCCAAAGAAGAAGCGGAAGGTCGGTATCCACGGAGTCCCAGCAGCC. In other embodiments, the Cas12b polypeptide contains a mutation that silences the catalytic activity of a RuvC domain. In other embodiments, the Cas12b polypeptide contains D574A, D829A and/or D952A mutations. In other embodiments, the fusion protein further contains a tag (e.g., an influenza hemagglutinin tag).

[0477] In some embodiments, the fusion protein comprises a napDNAbp domain (e.g., Cas12-derived domain) with an internally fused nucleobase editing domain (e.g., all or a portion of a deaminase domain, e.g., an adenosine deaminase domain). In some embodiments, the napDNAbp is a Cas12b. In some embodiments, the base editor comprises a BhCas12b domain with an internally fused TadA*8 domain inserted at the loci provided in Table B below.

TABLE B
Insertion loci in Cas12b proteins

| BhCas12b | Insertion site | Inserted between aa |
|---|---|---|
| position 1 | 153 | PS |
| position 2 | 255 | KE |
| position 3 | 306 | DE |
| position 4 | 980 | DG |
| position 5 | 1019 | KL |
| position 6 | 534 | FP |
| position 7 | 604 | KG |
| position 8 | 344 | HF |
| BvCas12b | Insertion site | Inserted between aa |
| position 1 | 147 | PD |
| position 2 | 248 | GG |
| position 3 | 299 | PE |
| position 4 | 991 | GE |
| position 5 | 1031 | KM |
| AaCas12b | Insertion site | Inserted between aa |
| position 1 | 157 | PG |
| position 2 | 258 | VG |
| position 3 | 310 | DP |
| position 4 | 1008 | GE |
| position 5 | 1044 | GK |

[0478] By way of nonlimiting example, an adenosine deaminase (e.g., ABE8.13) may be inserted into a BhCas12b to produce a fusion protein (e.g., ABE8.13-BhCas12b) that effectively edits a nucleic acid sequence. In some embodiments, the base editing system described herein comprises an ABE with TadA inserted into a Cas9.

Cas9 Domains with Reduced PAM Exclusivity

[0479] Typically, Cas9 proteins, such as Cas9 from S. pyogenes (spCas9), require a canonical NGG PAM sequence to bind a particular nucleic acid region, where the “N” in “NGG” is adenosine (A), thymidine (T), or cytosine (C), and the G is guanosine. This may limit the ability to edit desired bases within a genome. In some embodiments, the base editing fusion proteins provided herein may need to be placed at a precise location, for example a region comprising a target base that is upstream of the PAM. See e.g., Komor, A. C., et al., “Programmable editing of a target base in genomic DNA without double-stranded DNA cleavage” Nature 533, 420-424 (2016), the entire contents of which are hereby incorporated by reference. Accordingly, in some embodiments, any of the fusion proteins provided herein may contain a Cas9 domain that is capable of binding a nucleotide sequence that does not contain a canonical (e.g., NGG) PAM sequence. Cas9 domains that bind to non-canonical PAM sequences have been described in the art and would be apparent to the skilled artisan. For example, Cas9 domains that bind non-canonical PAM sequences have been described in Kleinstiver, B. P., et al., “Engineered CRISPR-Cas9 nucleases with altered PAM specificities” Nature 523, 481-485 (2015); and Kleinstiver, B. P., et al., “Broadening the targeting range of Staphylococcus aureus CRISPR-Cas9 by modifying PAM recognition” Nature Biotechnology 33, 1293-1298 (2015); Nishimasu, H., et al., “Engineered CRISPR-Cas9 nuclease with expanded targeting space” Science. 2018 Sep. 21; 361(6408):1259-1262, Chatterjee, P., et al., Minimal PAM specificity of a highly similar SpCas9 ortholog” Sci Adv. 2018 Oct. 24; 4 (10):eaau0766. doi: 10.1126/sciadv.aau0766, the entire contents of each are hereby incorporated by reference.

### Nucleobase Editing Domain

[0480] Described herein are base editors comprising a fusion protein that includes a polynucleotide programmable nucleotide binding domain and a nucleobase editing domain (e.g., a deaminase domain). The base editor can be programmed to edit one or more bases in a target polynucleotide sequence by interacting with a guide polynucleotide capable of recognizing the target sequence. Once the target sequence has been recognized, the base editor is anchored on the polynucleotide where editing is to occur and the deaminase domain components of the base editor can then edit a target base.

[0481] In some embodiments, the nucleobase editing domain includes a deaminase domain. As particularly described herein, the deaminase domain includes a cytosine deaminase or an adenosine deaminase. In embodiments, base editors include cytidine base editors (e.g., BE4) that convert target C⋅G base pairs to TA and adenine base editors (e.g., ABE7.10 and others) that convert A⋅T to G⋅C. In some embodiments, the terms “cytosine deaminase” and “cytidine deaminase” can be used interchangeably. In some embodiments, the terms “adenine deaminase” and “adenosine deaminase” can be used interchangeably. Details of nucleobase editing proteins are described in International PCT Application Nos. PCT/2017/045381 (WO2018/027078) and PCT/US2016/058344 (WO2017/070632), each of which is incorporated herein by reference for its entirety. Also see Komor, A. C., et al., “Programmable editing of a target base in genomic DNA without double-stranded DNA cleavage” Nature 533, 420-424 (2016); Gaudelli, N. M., et al., “Programmable base editing of A⋅T to G⋅C in genomic DNA without DNA cleavage” Nature 551, 464-471 (2017); and Komor, A. C., et al., “Improved base excision repair inhibition and bacteriophage Mu Gam protein yields C:G-to-T:A base editors with higher efficiency and product purity” Science Advances 3:eaao4774 (2017), the entire contents of which are hereby incorporated by reference.

### A to G Editing

[0482] In some embodiments, a base editor described herein can comprise a deaminase domain which includes an adenosine deaminase. Such an adenosine deaminase domain of a base editor can facilitate the editing of an adenine (A) nucleobase to a guanine (G) nucleobase by deaminating the A to form inosine (I), which exhibits base pairing properties of G. Adenosine deaminase is capable of deaminating (i.e., removing an amine group) adenine of a deoxyadenosine residue in deoxyribonucleic acid (DNA).

[0483] In some embodiments, the nucleobase editors provided herein can be made by fusing together one or more protein domains, thereby generating a fusion protein. In certain embodiments, the fusion proteins provided herein comprise one or more features that improve the base editing activity (e.g., efficiency, selectivity, and specificity) of the fusion proteins. For example, the fusion proteins provided herein can comprise a Cas9 domain that has reduced nuclease activity. In some embodiments, the fusion proteins provided herein can have a Cas9 domain that does not have nuclease activity (dCas9), or a Cas9 domain that cuts one strand of a duplexed DNA molecule, referred to as a Cas9 nickase (nCas9). Without wishing to be bound by any particular theory, the presence of the catalytic residue (e.g., H840) maintains the activity of the Cas9 to cleave the non-edited (e.g., non-deaminated) strand containing a T opposite the targeted A. Mutation of the catalytic residue (e.g., D10 to A10) of Cas9 prevents cleavage of the edited strand containing the targeted A residue. Such Cas9 variants are able to generate a single-strand DNA break (nick) at a specific location based on the gRNA-defined target sequence, leading to repair of the non-edited strand, ultimately resulting in a T to C change on the non-edited strand. In some embodiments, an A-to-G base editor further comprises an inhibitor of inosine base excision repair, for example, a uracil glycosylase inhibitor (UGI) domain or a catalytically inactive inosine specific nuclease. Without wishing to be bound by any particular theory, the UGI domain or catalytically inactive inosine specific nuclease can inhibit or prevent base excision repair of a deaminated adenosine residue (e.g., inosine), which can improve the activity or efficiency of the base editor.

[0484] A base editor comprising an adenosine deaminase can act on any polynucleotide, including DNA, RNA and DNA-RNA hybrids. In certain embodiments, a base editor comprising an adenosine deaminase can deaminate a target A of a polynucleotide comprising RNA. For example, the base editor can comprise an adenosine deaminase domain capable of deaminating a target A of an RNA polynucleotide and/or a DNA-RNA hybrid polynucleotide. In an embodiment, an adenosine deaminase incorporated into a base editor comprises all or a portion of adenosine deaminase acting on RNA (ADAR, e.g., ADAR1 or ADAR2). In another embodiment, an adenosine deaminase incorporated into a base editor comprises all or a portion of adenosine deaminase acting on tRNA (ADAT). A base editor comprising an adenosine deaminase domain can also be capable of deaminating an A nucleobase of a DNA polynucleotide. In an embodiment an adenosine deaminase domain of a base editor comprises all or a portion of an ADAT comprising one or more mutations which permit the ADAT to deaminate a target A in DNA. For example, the base editor can comprise all or a portion of an ADAT from Escherichia coli (EcTadA) comprising one or more of the following mutations: D108N, A106V, D147Y, E155V, L84F, H123Y, I157F, or a corresponding mutation in another adenosine deaminase.

[0485] The adenosine deaminase can be derived from any suitable organism (e.g., E. coli). In some embodiments, the adenine deaminase is a naturally-occurring adenosine deaminase that includes one or more mutations corresponding to any of the mutations provided herein (e.g., mutations in ecTadA). The corresponding residue in any homologous protein can be identified by e.g., sequence alignment and determination of homologous residues. The mutations in any naturally-occurring adenosine deaminase (e.g., having homology to ecTadA) that corresponds to any of the mutations described herein (e.g., any of the mutations identified in ecTadA) can be generated accordingly.

### TadA

[0486] In particular embodiments, the TadA is any one of the TadA described in PCT/US2017/045381 (WO 2018/027078), which is incorporated herein by reference in its entirety.

[0487] In particular embodiments, the fusion proteins comprise a single (e.g., provided as a monomer) TadA*8 variant. In some embodiments, the TadA*8 is linked to a Cas9 nickase. In some embodiments, the fusion proteins of the invention comprise as a heterodimer a wild-type TadA (TadA (wt)) linked to a TadA*8 variant. In other embodiments, the fusion proteins of the invention comprise as a heterodimer a TadA*7.10 linked to a TadA*8 variant. In some embodiments, the base editor is ABE8 comprising a TadA*8 variant monomer. In some embodiments, the base editor is ABE8 comprising a heterodimer of a TadA*8 variant and a TadA (wt). In some embodiments, the base editor is ABE8 comprising a heterodimer of a TadA*8 variant and TadA*7.10. In some embodiments, the base editor is ABE8 comprising a heterodimer of a TadA*8 variants. In some embodiments, the TadA*8 variant is selected from Table 7. In some embodiments, the ABE8 is selected from Table 7. The relevant sequences follow:

Wild-type TadA (TadA(wt)) or
“the TadA reference sequence”
MSEVEFSHEYWMRHALTLAKRAWDEREVPVGAVLVH
NNRVIGEGWNRPIGRHDPTAHAEIMALRQGGLVMQN
YRLIDATLYVTLEPCVMCAGAMIHSRIGRVVFGARD
AKTGAAGSLMDVLHHPGMNHRVEITEGILADECAAL
LSDFFRMRRQEIKAQKKAQSSTD
TadA*7.10:
MSEVEFSHEYW MRHALTLAKR ARDEREVPVG
AVLVLNNRVI GEGWNRAIGL HDPTAHAEIM
ALRQGGLVMQ NYRLIDATLY VTFEPCVMCA
GAMIHSRIGR VVFGVRNAKT GAAGSLMDVL
HYPGMNHRVE ITEGILADEC AALLCYFFRM
PRQVFNAQKK AQSSTD

[0488] In some embodiments, the adenosine deaminase comprises an amino acid sequence that is at least 60%, at least 65%, at least 70%, at least 75%, at least 80%, at least 85%, at least 90%, at least 95%, at least 96%, at least 97%, at least 98%, at least 99%, or at least 99.5% identical to any one of the amino acid sequences set forth in any of the adenosine deaminases provided herein. It should be appreciated that adenosine deaminases provided herein may include one or more mutations (e.g., any of the mutations provided herein). The disclosure provides any deaminase domains with a certain percent identity plus any of the mutations or combinations thereof described herein. In some embodiments, the adenosine deaminase comprises an amino acid sequence that has 1, 2, 3, 4, 5, 6, 7, 8, 9, 10, 11, 12, 13, 14, 15, 16, 17, 18, 19, 20, 21, 22, 23, 24, 25, 26, 27, 28, 29, 30, 31, 32, 33, 34, 35, 36, 37, 38, 39, 40, 41, 42, 43, 44, 45, 46, 47, 48, 49, 50, or more mutations compared to a reference sequence, or any of the adenosine deaminases provided herein. In some embodiments, the adenosine deaminase comprises an amino acid sequence that has at least 5, at least 10, at least 15, at least 20, at least 25, at least 30, at least 35, at least 40, at least 45, at least 50, at least 60, at least 70, at least 80, at least 90, at least 100, at least 110, at least 120, at least 130, at least 140, at least 150, at least 160, or at least 170 identical contiguous amino acid residues as compared to any one of the amino acid sequences known in the art or described herein.

[0489] In some embodiments the TadA deaminase is a full-length E. coli TadA deaminase. For example, in certain embodiments, the adenosine deaminase comprises the amino acid sequence:

MRRAFITGVFFLSEVEFSHEYWMRHALTLAK
RAWDEREVPVGAVLVHNNRVIGEGWNRPIGR
HDPTAHAEIMALRQGGLVMQNYRLIDATLYV
TLEPCVMCAGAMIHSRIGRVVFGARDAKTGA
AGSLMDVLHHPGMNHRVEITEGILADECAAL
LSDFFRMRRQEI KAQKKAQSSTD.

[0490] It should be appreciated, however, that additional adenosine deaminases useful in the present application would be apparent to the skilled artisan and are within the scope of this disclosure. For example, the adenosine deaminase may be a homolog of adenosine deaminase acting on tRNA (ADAT). Without limitation, the amino acid sequences of exemplary AD AT homologs include the following:

Staphylococcus aureus TadA:
MGSHMTNDIYFMTLAIEEAKKAAQLGEVPIGAIIT
KDDEVIARAHNLRETLQQPTAHAEHIAIERAAKVL
GSWRLEGCTLYVTLEPCVMCAGTIVMSRIPRVVYG
ADDPKGGCSGSLMNLLQQSNFNHRAIVDKGVLKEA
CSTLLTTFFKNLRANKKSTN
Bacillus subtilis TadA:
MTQDELYMKEAIKEAKKAEEKGEVPIGAVLVINGE
IIARAHNLRETEQRSIAHAEMLVIDEACKALGTWR
LEGATLYVTLEPCPMCAGAVVLSRVEKVVFGAFDP
KGGCSGTLMNLLQEERFNHQAEVVSGVLEEECGGM
LSAFFRELRKKKKAARKNLSE
Salmonella typhimurium (S. typhimurium)
TadA:
MPPAFITGVTSLSDVELDHEYWMRHALTLAKRAWD
EREVPVGAVLVHNHRVIGEGWNRPIGRHDPTAHAE
IMALRQGGLVLQNYRLLDTTLYVTLEPCVMCAGAM
VHSRIGRVVFGARDAKTGAAGSLIDVLHHPGMNHR
VEIIEGVLRDECATLLSDFFRMRRQEIKALKKADR
AEGAGPAV
Shewanella putrefaciens
(S. putrefaciens)
TadA:
MDEYWMQVAMQMAEKAEAAGEVPVGAVLVKDGQQI
ATGYNLSISQHDPTAHAEILCLRSAGKKLENYRLL
DATLYITLEPCAMCAGAMVHSRIARVVYGARDEKT
GAAGTVVNLLQHPAFNHQVEVTSGVLAEACSAQLS
RFFKRRRDEKKALKLAQRAQQGIE
Haemophilus influenzaeF3031
(H. influenzae) TadA:
MDAAKVRSEFDEKMMRYALELADKAEALGEIPVGA
VLVDDARNIIGEGWNLSIVQSDPTAHAElIALRNG
AKNIQNYRLLNSTLYVTLEPCTMCAGAILHSRIKR
LVFGASDYKTGAIGSRFHFFDDYKNINHTLEITSG
VLAEECSQKLSTFFQKRREEKKIEKALLKSLSDK
Caulobacter crescentus (C. crescentus)
TadA:
MRTDESEDQDHRMMRLALDAARAAAEAGETPVGAV
ILDPSTGEVIATAGNGPIAAHDPTAHAEIAAMRAA
AAKLGNYRLTDLTLVVTLEPCAMCAGAISHARIGR
VVFGADDPKGGAVVHGPKFFAQPTCHWRPEVTGGV
LADESADLLRGFFRARRKAKI
Geobacter sulfurreducens
(G. sulfitrreducens) TadA:
MSSLKKTPIRDDAYWMGKAIREAAKAAARDEVPIG
AVIVRDGAVIGRGHNLREGSNDPSAHAEMIAIRQA
ARRSANWRLTGATLYVTLEPCLMCMGAIILARLER
VVFGCYDPKGGAAGSLYDLSADPRLNHQVRLSPGV
CQEECGTMLSDFFRDLRRRKKAKATPALFIDERKV
PPEP
An embodiment of E. coli TadA (ecTadA)
includes the following:
MSEVEFSHEYWMRHALTLAKRARDEREVPVGAVLV
LNNRVIGEGWNRAIGLHDPTAHAEIMALRQGGLVM
QNYRLIDATLYVTFEPCVMCAGAMIHSRIGRVVFG
VRNAKTGAAGSLMDVLHYPGMNHRVEITEGILADE
CAALLCYFFRMPRQVFNAQKKAQSSTD

[0491] In some embodiments, the adenosine deaminase is from a prokaryote. In some embodiments, the adenosine deaminase is from a bacterium. In some embodiments, the adenosine deaminase is from Escherichia coli, Staphylococcus aureus, Salmonella typhi, Shewanella putrefaciens, Haemophilus influenzae, Caulobacter crescentus, or Bacillus subtilis. In some embodiments, the adenosine deaminase is from E. coli.

[0492] In one embodiment, a fusion protein of the invention comprises a wild-type TadA linked to TadA7.10, which is linked to Cas9 nickase. In particular embodiments, the fusion proteins comprise a single TadA7.10 domain (e.g., provided as a monomer). In other embodiments, the ABE7.10 editor comprises TadA7.10 and TadA (wt), which are capable of forming heterodimers.

[0493] In some embodiments, the adenosine deaminase comprises an amino acid sequence that is at least 60%, at least 65%, at least 70%, at least 75%, at least 80%, at least 85%, at least 90%, at least 95%, at least 96%, at least 97%, at least 98%, at least 99%, or at least 99.5% identical to any one of the amino acid sequences set forth in any of the adenosine deaminases provided herein. It should be appreciated that adenosine deaminases provided herein may include one or more mutations (e.g., any of the mutations provided herein). The disclosure provides any deaminase domains with a certain percent identity plus any of the mutations or combinations thereof described herein. In some embodiments, the adenosine deaminase comprises an amino acid sequence that has 1, 2, 3, 4, 5, 6, 7, 8, 9, 10, 11, 12, 13, 14, 15, 16, 17, 18, 19, 20, 21, 22, 23, 24, 25, 26, 27, 28, 29, 30, 31, 32, 33, 34, 35, 36, 37, 38, 39, 40, 41, 42, 43, 44, 45, 46, 47, 48, 49, 50, or more mutations compared to a reference sequence, or any of the adenosine deaminases provided herein. In some embodiments, the adenosine deaminase comprises an amino acid sequence that has at least 5, at least 10, at least 15, at least 20, at least 25, at least 30, at least 35, at least 40, at least 45, at least 50, at least 60, at least 70, at least 80, at least 90, at least 100, at least 110, at least 120, at least 130, at least 140, at least 150, at least 160, or at least 170 identical contiguous amino acid residues as compared to any one of the amino acid sequences known in the art or described herein.

[0494] It should be appreciated that any of the mutations provided herein (e.g., based on the TadA reference sequence) can be introduced into other adenosine deaminases, such as E. coli TadA (ecTadA), S. aureus TadA (saTadA), or other adenosine deaminases (e.g., bacterial adenosine deaminases). It would be apparent to the skilled artisan that additional deaminases may similarly be aligned to identify homologous amino acid residues that can be mutated as provided herein. Thus, any of the mutations identified in the TadA reference sequence can be made in other adenosine deaminases (e.g., ecTada) that have homologous amino acid residues. It should also be appreciated that any of the mutations provided herein can be made individually or in any combination in the TadA reference sequence or another adenosine deaminase.

[0495] In some embodiments, the adenosine deaminase comprises a D108X mutation in the TadA reference sequence, or a corresponding mutation in another adenosine deaminase (e.g., ecTadA), where X indicates any amino acid other than the corresponding amino acid in the wild-type adenosine deaminase. In some embodiments, the adenosine deaminase comprises a D108G, D108N, D108V, D108A, or D108Y mutation, or a corresponding mutation in another adenosine deaminase.

[0496] In some embodiments, the adenosine deaminase comprises an A106X mutation in TadA reference sequence, or a corresponding mutation in another adenosine deaminase (e.g., ecTadA), where X indicates any amino acid other than the corresponding amino acid in the wild-type adenosine deaminase. In some embodiments, the adenosine deaminase comprises an A106V mutation in TadA reference sequence, or a corresponding mutation in another adenosine deaminase (e.g., wild type TadA or ecTadA).

[0497] In some embodiments, the adenosine deaminase comprises a E155X mutation in TadA reference sequence, or a corresponding mutation in another adenosine deaminase (e.g., ecTadA), where the presence of X indicates any amino acid other than the corresponding amino acid in the wild-type adenosine deaminase. In some embodiments, the adenosine deaminase comprises a E155D, E155G, or E155V mutation in TadA reference sequence, or a corresponding mutation in another adenosine deaminase (e.g., ecTadA).

[0498] In some embodiments, the adenosine deaminase comprises a D147X mutation in TadA reference sequence, or a corresponding mutation in another adenosine deaminase (e.g., ecTadA), where the presence of X indicates any amino acid other than the corresponding amino acid in the wild-type adenosine deaminase. In some embodiments, the adenosine deaminase comprises a D147Y, mutation in TadA reference sequence, or a corresponding mutation in another adenosine deaminase (e.g., ecTadA).

[0499] In some embodiments, the adenosine deaminase comprises an A106X, E155X, or D147X, mutation in the TadA reference sequence, or a corresponding mutation in another adenosine deaminase (e.g., ecTadA), where X indicates any amino acid other than the corresponding amino acid in the wild-type adenosine deaminase. In some embodiments, the adenosine deaminase comprises an E155D, E155G, or E155V mutation. In some embodiments, the adenosine deaminase comprises a D147Y.

[0500] For example, an adenosine deaminase can contain a D108N, a A106V, a E155V, and/or a D147Y mutation in TadA reference sequence, or a corresponding mutation in another adenosine deaminase (e.g., ecTadA). In some embodiments, an adenosine deaminase comprises the following group of mutations (groups of mutations are separated by a “;”) in TadA reference sequence, or corresponding mutations in another adenosine deaminase (e.g., ecTadA): D108N and A106V; D108N and E155V; D108N and D147Y; A106V and E155V; A106V and D147Y; E155V and D147Y; D108N, A106V, and E55V; D108N, A106V, and D147Y; D108N, E55V, and D147Y; A106V, E55V, and D147Y; and D108N, A106V, E155V, and D147Y. It should be appreciated, however, that any combination of corresponding mutations provided herein can be made in an adenosine deaminase (e.g., ecTadA).

[0501] In some embodiments, the adenosine deaminase comprises one or more of a H8X, T17X, L18X, W23X, L34X, W45X, R51X, A56X, E59X, E85X, M94X, I95X, V102X, F104X, A106X, R107X, D108X, K110X, M118X, N127X, A138X, F149X, M151X, R153X, Q154X, I156X, and/or K157X mutation in TadA reference sequence, or one or more corresponding mutations in another adenosine deaminase (e.g., ecTadA), where the presence of X indicates any amino acid other than the corresponding amino acid in the wild-type adenosine deaminase. In some embodiments, the adenosine deaminase comprises one or more of H8Y, T17S, L18E, W23L, L34S, W45L, R51H, A56E, or A56S, E59G, E85K, or E85G, M94L, 1951, V102A, F104L, A106V, R107C, or R107H, or R107P, D108G, or D108N, or D108V, or D108A, or D108Y, K110I, M118K, N127S, A138V, F149Y, M151V, R153C, Q154L, I156D, and/or K157R mutation in TadA reference sequence, or one or more corresponding mutations in another adenosine deaminase (e.g., ecTadA).

[0502] In some embodiments, the adenosine deaminase comprises one or more of a H8X, D108X, and/or N127X mutation in TadA reference sequence, or one or more corresponding mutations in another adenosine deaminase (e.g., ecTadA), where X indicates the presence of any amino acid. In some embodiments, the adenosine deaminase comprises one or more of a H8Y, D108N, and/or N127S mutation in TadA reference sequence, or one or more corresponding mutations in another adenosine deaminase (e.g., ecTadA).

[0503] In some embodiments, the adenosine deaminase comprises one or more of H8X, R26X, M61X, L68X, M70X, A106X, D108X, A109X, N127X, D147X, R152X, Q154X, E155X, K161X, Q163X, and/or T166X mutation in TadA reference sequence, or one or more corresponding mutations in another adenosine deaminase (e.g., ecTadA), where X indicates the presence of any amino acid other than the corresponding amino acid in the wild-type adenosine deaminase. In some embodiments, the adenosine deaminase comprises one or more of H8Y, R26W, M61I, L68Q, M70V, A106T, D108N, A109T, N127S, D147Y, R152C, Q154H or Q154R, E155G or E155V or E155D, K161Q, Q163H, and/or T166P mutation in TadA reference sequence, or one or more corresponding mutations in another adenosine deaminase (e.g., ecTadA).

[0504] In some embodiments, the adenosine deaminase comprises one, two, three, four, five, or six mutations selected from the group consisting of H8X, D108X, N127X, D147X, R152X, and Q154X in TadA reference sequence, or a corresponding mutation or mutations in another adenosine deaminase (e.g., ecTadA), where X indicates the presence of any amino acid other than the corresponding amino acid in the wild-type adenosine deaminase. In some embodiments, the adenosine deaminase comprises one, two, three, four, five, six, seven, or eight mutations selected from the group consisting of H8X, M61X, M70X, D108X, N127X, Q154X, E155X, and Q163X in TadA reference sequence, or a corresponding mutation or mutations in another adenosine deaminase (e.g., ecTadA), where X indicates the presence of any amino acid other than the corresponding amino acid in the wild-type adenosine deaminase. In some embodiments, the adenosine deaminase comprises one, two, three, four, or five, mutations selected from the group consisting of H8X, D108X, N127X, E155X, and T166X in TadA reference sequence, or a corresponding mutation or mutations in another adenosine deaminase (e.g., ecTadA), where X indicates the presence of any amino acid other than the corresponding amino acid in the wild-type adenosine deaminase.

[0505] In some embodiments, the adenosine deaminase comprises one, two, three, four, five, or six mutations selected from the group consisting of H8X, A106X, D108X, mutation or mutations in another adenosine deaminase, where X indicates the presence of any amino acid other than the corresponding amino acid in the wild-type adenosine deaminase. In some embodiments, the adenosine deaminase comprises one, two, three, four, five, six, seven, or eight mutations selected from the group consisting of H8X, R126X, L68X, D108X, N127X, D147X, and E155X, or a corresponding mutation or mutations in another adenosine deaminase, where X indicates the presence of any amino acid other than the corresponding amino acid in the wild-type adenosine deaminase. In some embodiments, the adenosine deaminase comprises one, two, three, four, or five, mutations selected from the group consisting of H8X, D108X, A109X, N127X, and E155X in TadA reference sequence, or a corresponding mutation or mutations in another adenosine deaminase (e.g., ecTadA), where X indicates the presence of any amino acid other than the corresponding amino acid in the wild-type adenosine deaminase.

[0506] In some embodiments, the adenosine deaminase comprises one, two, three, four, five, or six mutations selected from the group consisting of H8Y, D108N, N127S, D147Y, R152C, and Q154H in TadA reference sequence, or a corresponding mutation or mutations in another adenosine deaminase (e.g., ecTadA). In some embodiments, the adenosine deaminase comprises one, two, three, four, five, six, seven, or eight mutations selected from the group consisting of H8Y, M61I, M70V, D108N, N127S, Q154R, E155G and Q163H in TadA reference sequence, or a corresponding mutation or mutations in another adenosine deaminase (e.g., ecTadA). In some embodiments, the adenosine deaminase comprises one, two, three, four, or five, mutations selected from the group consisting of H8Y, D108N, N127S, E155V, and T166P in TadA reference sequence, or a corresponding mutation or mutations in another adenosine deaminase (e.g., ecTadA). In some embodiments, the adenosine deaminase comprises one, two, three, four, five, or six mutations selected from the group consisting of H8Y, A106T, D108N, N127S, E155D, and K161Q in TadA reference sequence, or a corresponding mutation or mutations in another adenosine deaminase (e.g., ecTadA). In some embodiments, the adenosine deaminase comprises one, two, three, four, five, six, seven, or eight mutations selected from the group consisting of H8Y, R126W, L68Q, D108N, N127S, D147Y, and E155V in TadA reference sequence, or a corresponding mutation or mutations in another adenosine deaminase (e.g., ecTadA). In some embodiments, the adenosine deaminase comprises one, two, three, four, or five, mutations selected from the group consisting of H8Y, D108N, A109T, N127S, and E155G in TadA reference sequence, or a corresponding mutation or mutations in another adenosine deaminase (e.g., ecTadA).

[0507] Any of the mutations provided herein and any additional mutations (e.g., based on the ecTadA amino acid sequence) can be introduced into any other adenosine deaminases. Any of the mutations provided herein can be made individually or in any combination in TadA reference sequence or another adenosine deaminase (e.g., ecTadA).

[0508] Details of A to G nucleobase editing proteins are described in International PCT Application No. PCT/2017/045381 (WO2018/027078) and Gaudelli, N. M., et al., “Programmable base editing of A⋅T to G⋅C in genomic DNA without DNA cleavage” Nature, 551, 464-471 (2017), the entire contents of which are hereby incorporated by reference.

[0509] In some embodiments, the adenosine deaminase comprises one or more corresponding mutations in another adenosine deaminase (e.g., ecTadA). In some embodiments, the adenosine deaminase comprises a D108N, D108G, or D108V mutation in TadA reference sequence, or corresponding mutations in another adenosine deaminase (e.g., ecTadA). In some embodiments, the adenosine deaminase comprises a A106V and D108N mutation in TadA reference sequence, or corresponding mutations in another adenosine deaminase (e.g., ecTadA). In some embodiments, the adenosine deaminase comprises R107C and D108N mutations in TadA reference sequence, or corresponding mutations in another adenosine deaminase (e.g., ecTadA). In some embodiments, the adenosine deaminase comprises a H8Y, D108N, N127S, D147Y, and Q154H mutation in TadA reference sequence, or corresponding mutations in another adenosine deaminase (e.g., ecTadA). In some embodiments, the adenosine deaminase comprises a H8Y, R24W, D108N, N127S, D147Y, and E155V mutation in TadA reference sequence, or corresponding mutations in another adenosine deaminase (e.g., ecTadA). In some embodiments, the adenosine deaminase comprises a D108N, D147Y, and E155V mutation in TadA reference sequence, or corresponding mutations in another adenosine deaminase (e.g., ecTadA). In some embodiments, the adenosine deaminase comprises a H8Y, D108N, and N127S mutation in TadA reference sequence, or corresponding mutations in another adenosine deaminase (e.g., ecTadA). In some embodiments, the adenosine deaminase comprises a A106V, D108N, D147Y and E155V mutation in TadA reference sequence, or corresponding mutations in another adenosine deaminase (e.g., ecTadA).

[0510] In some embodiments, the adenosine deaminase comprises one or more of a S2X, H8X, I49X, L84X, H123X, N127X, I156X and/or K160X mutation in TadA reference sequence, or one or more corresponding mutations in another adenosine deaminase, where the presence of X indicates any amino acid other than the corresponding amino acid in the wild-type adenosine deaminase. In some embodiments, the adenosine deaminase comprises one or more of S2A, H8Y, I49F, L84F, H123Y, N127S, I156F and/or K160S mutation in TadA reference sequence, or one or more corresponding mutations in another adenosine deaminase (e.g., ecTadA).

[0511] In some embodiments, the adenosine deaminase comprises an L84X mutation adenosine deaminase, where X indicates any amino acid other than the corresponding amino acid in the wild-type adenosine deaminase. In some embodiments, the adenosine deaminase comprises an L84F mutation in TadA reference sequence, or a corresponding mutation in another adenosine deaminase (e.g., ecTadA).

[0512] In some embodiments, the adenosine deaminase comprises an H123X mutation in TadA reference sequence, or a corresponding mutation in another adenosine deaminase (e.g., ecTadA), where X indicates any amino acid other than the corresponding amino acid in the wild-type adenosine deaminase. In some embodiments, the adenosine deaminase comprises an H123Y mutation in TadA reference sequence, or a corresponding mutation in another adenosine deaminase (e.g., ecTadA).

[0513] In some embodiments, the adenosine deaminase comprises an I157X mutation in TadA reference sequence, or a corresponding mutation in another adenosine deaminase (e.g., ecTadA), where X indicates any amino acid other than the corresponding amino acid in the wild-type adenosine deaminase. In some embodiments, the adenosine deaminase comprises an 1157F mutation in TadA reference sequence, or a corresponding mutation in another adenosine deaminase (e.g., ecTadA).

[0514] In some embodiments, the adenosine deaminase comprises one, two, three, four, five, six, or seven mutations selected from the group consisting of L84X, A106X, D108X, H123X, D147X, E155X, and I156X in TadA reference sequence, or a corresponding mutation or mutations in another adenosine deaminase (e.g., ecTadA), where X indicates the presence of any amino acid other than the corresponding amino acid in the wild-type adenosine deaminase. In some embodiments, the adenosine deaminase comprises one, two, three, four, five, or six mutations selected from the group consisting of S2X, I49X, A106X, D108X, D147X, and E155X in TadA reference sequence, or a corresponding mutation or mutations in another adenosine deaminase (e.g., ecTadA), where X indicates the presence of any amino acid other than the corresponding amino acid in the wild-type adenosine deaminase. In some embodiments, the adenosine deaminase comprises one, two, three, four, or five, mutations selected from the group consisting of H8X, A106X, D108X, N127X, and K160X in TadA reference sequence, or a corresponding mutation or mutations in another adenosine deaminase (e.g., ecTadA), where X indicates the presence of any amino acid other than the corresponding amino acid in the wild-type adenosine deaminase.

[0515] In some embodiments, the adenosine deaminase comprises one, two, three, four, five, six, or seven mutations selected from the group consisting of L84F, A106V, D108N, H123Y, D147Y, E155V, and I156F in TadA reference sequence, or a corresponding mutation or mutations in another adenosine deaminase (e.g., ecTadA). In some embodiments, the adenosine deaminase comprises one, two, three, four, five, or six mutations selected from the group consisting of S2A, I49F, A106V, D108N, D147Y, and E155V in TadA reference sequence.

[0516] In some embodiments, the adenosine deaminase comprises one, two, three, four, or five, mutations selected from the group consisting of H8Y, A106T, D108N, N127S, and K160S in TadA reference sequence, or a corresponding mutation or mutations in another adenosine deaminase (e.g., ecTadA).

[0517] In some embodiments, the adenosine deaminase comprises one or more of a E25X, R26X, R107X, A142X, and/or A143X mutation in TadA reference sequence, or one or more corresponding mutations in another adenosine deaminase (e.g., ecTadA), where the presence of X indicates any amino acid other than the corresponding amino acid in the wild-type adenosine deaminase. In some embodiments, the adenosine deaminase comprises one or more of E25M, E25D, E25A, E25R, E25V, E25S, E25Y, R26G, R26N, R26Q, R26C, R26L, R26K, R107P, R07K, R107A, R107N, R107W, R107H, R107S, A142N, A142D, A142G, A143D, A143G, A143E, A143L, A143W, A143M, A143S, A143Q and/or A143R mutation in TadA reference sequence, or one or more corresponding mutations in another adenosine deaminase (e.g., ecTadA). In some embodiments, the adenosine deaminase comprises one or more of the mutations described herein corresponding to TadA reference sequence, or one or more corresponding mutations in another adenosine deaminase (e.g., ecTadA).

[0518] In some embodiments, the adenosine deaminase comprises an E25X mutation in TadA reference sequence, or a corresponding mutation in another adenosine deaminase (e.g., ecTadA), where X indicates any amino acid other than the corresponding amino acid in the wild-type adenosine deaminase. In some embodiments, the adenosine deaminase comprises an E25M, E25D, E25A, E25R, E25V, E25S, or E25Y mutation in TadA reference sequence, or a corresponding mutation in another adenosine deaminase (e.g., ecTadA).

[0519] In some embodiments, the adenosine deaminase comprises an R26X mutation in TadA reference sequence, or a corresponding mutation in another adenosine deaminase (e.g., ecTadA), where X indicates any amino acid other than the corresponding amino acid in the wild-type adenosine deaminase. In some embodiments, the adenosine deaminase comprises R26G, R26N, R26Q, R26C, R26L, or R26K mutation in TadA reference sequence, or a corresponding mutation in another adenosine deaminase (e.g., ecTadA).

[0520] In some embodiments, the adenosine deaminase comprises an R107X mutation in TadA reference sequence, or a corresponding mutation in another adenosine deaminase (e.g., ecTadA), where X indicates any amino acid other than the corresponding amino acid in the wild-type adenosine deaminase. In some embodiments, the adenosine deaminase comprises an R107P, R07K, R107A, R107N, R107W, R107H, or R107S mutation in TadA reference sequence, or a corresponding mutation in another adenosine deaminase (e.g., ecTadA).

[0521] In some embodiments, the adenosine deaminase comprises an A142X mutation in TadA reference sequence, or a corresponding mutation in another adenosine deaminase (e.g., ecTadA), where X indicates any amino acid other than the corresponding amino acid in the wild-type adenosine deaminase. In some embodiments, the adenosine deaminase comprises an A142N, A142D, A142G, mutation in TadA reference sequence, or a corresponding mutation in another adenosine deaminase (e.g., ecTadA).

[0522] In some embodiments, the adenosine deaminase comprises an A143X mutation in TadA reference sequence, or a corresponding mutation in another adenosine deaminase (e.g., ecTadA), where X indicates any amino acid other than the corresponding amino acid in the wild-type adenosine deaminase. In some embodiments, the adenosine deaminase comprises an A143D, A143G, A143E, A143L, A143W, A143M, A143S, A143Q and/or A143R mutation in TadA reference sequence, or a corresponding mutation in another adenosine deaminase (e.g., ecTadA).

[0523] In some embodiments, the adenosine deaminase comprises one or more of a H36X, N37X, P48X, I49X, R51X, M70X, N72X, D77X, E134X, S 146X, Q154X, K157X, and/or K161X mutation in TadA reference sequence, or one or more corresponding mutations in another adenosine deaminase (e.g., ecTadA), where the presence of X indicates any amino acid other than the corresponding amino acid in the wild-type adenosine deaminase. In some embodiments, the adenosine deaminase comprises one or more of H36L, N37T, N37S, P48T, P48L, I49V, R51H, R51L, M70L, N72S, D77G, E134G, S146R, S146C, Q154H, K157N, and/or K161T mutation in TadA reference sequence, or one or more corresponding mutations in another adenosine deaminase (e.g., ecTadA).

[0524] In some embodiments, the adenosine deaminase comprises an H36X mutation in TadA reference sequence, or a corresponding mutation in another adenosine deaminase (e.g., ecTadA), where X indicates any amino acid other than the corresponding amino acid in the wild-type adenosine deaminase. In some embodiments, the adenosine deaminase comprises an H36L mutation in TadA reference sequence, or a corresponding mutation in another adenosine deaminase (e.g., ecTadA).

[0525] In some embodiments, the adenosine deaminase comprises an N37X mutation in TadA reference sequence, or a corresponding mutation in another adenosine deaminase (e.g., ecTadA), where X indicates any amino acid other than the corresponding amino acid in the wild-type adenosine deaminase. In some embodiments, the adenosine deaminase comprises an N37T, or N37S mutation in TadA reference sequence, or a corresponding mutation in another adenosine deaminase (e.g., ecTadA).

[0526] In some embodiments, the adenosine deaminase comprises an P48X mutation in TadA reference sequence, or a corresponding mutation in another adenosine deaminase (e.g., ecTadA), where X indicates any amino acid other than the corresponding amino acid in the wild-type adenosine deaminase. In some embodiments, the adenosine deaminase comprises an P48T, or P48L mutation in TadA reference sequence, or a corresponding mutation in another adenosine deaminase (e.g., ecTadA).

[0527] In some embodiments, the adenosine deaminase comprises an R51X mutation in TadA reference sequence, or a corresponding mutation in another adenosine deaminase, where X indicates any amino acid other than the corresponding amino acid in the wild-type adenosine deaminase. In some embodiments, the adenosine deaminase comprises an R51H, or R51L mutation in TadA reference sequence, or a corresponding mutation in another adenosine deaminase (e.g., ecTadA).

[0528] In some embodiments, the adenosine deaminase comprises an S146X mutation in TadA reference sequence, or a corresponding mutation in another adenosine deaminase (e.g., ecTadA), where X indicates any amino acid other than the corresponding amino acid in the wild-type adenosine deaminase. In some embodiments, the adenosine deaminase comprises an S146R, or S146C mutation in TadA reference sequence, or a corresponding mutation in another adenosine deaminase (e.g., ecTadA).

[0529] In some embodiments, the adenosine deaminase comprises an K157X mutation in TadA reference sequence, or a corresponding mutation in another adenosine deaminase (e.g., ecTadA), where X indicates any amino acid other than the corresponding amino acid in the wild-type adenosine deaminase. In some embodiments, the adenosine deaminase comprises a K157N mutation in TadA reference sequence, or a corresponding mutation in another adenosine deaminase (e.g., ecTadA).

[0530] In some embodiments, the adenosine deaminase comprises an P48X mutation in TadA reference sequence, or a corresponding mutation in another adenosine deaminase (e.g., ecTadA), where X indicates any amino acid other than the corresponding amino acid in the wild-type adenosine deaminase. In some embodiments, the adenosine deaminase comprises a P48S, P48T, or P48A mutation in TadA reference sequence, or a corresponding mutation in another adenosine deaminase (e.g., ecTadA).

[0531] In some embodiments, the adenosine deaminase comprises an A142X mutation in TadA reference sequence, or a corresponding mutation in another adenosine deaminase (e.g., ecTadA), where X indicates any amino acid other than the corresponding amino acid in the wild-type adenosine deaminase. In some embodiments, the adenosine deaminase comprises a A142N mutation in TadA reference sequence, or a corresponding mutation in another adenosine deaminase (e.g., ecTadA).

[0532] In some embodiments, the adenosine deaminase comprises an W23X mutation in TadA reference sequence, or a corresponding mutation in another adenosine deaminase (e.g., ecTadA), where X indicates any amino acid other than the corresponding amino acid in the wild-type adenosine deaminase. In some embodiments, the adenosine deaminase comprises a W23R, or W23L mutation in TadA reference sequence, or a corresponding mutation in another adenosine deaminase (e.g., ecTadA).

[0533] In some embodiments, the adenosine deaminase comprises an R152X mutation in TadA reference sequence, or a corresponding mutation in another adenosine deaminase (e.g., ecTadA), where X indicates any amino acid other than the corresponding amino acid in the wild-type adenosine deaminase. In some embodiments, the adenosine deaminase comprises a R152P, or R52H mutation in TadA reference sequence, or a corresponding mutation in another adenosine deaminase (e.g., ecTadA).

[0534] In one embodiment, the adenosine deaminase may comprise the mutations H36L, R51L, L84F, A106V, D108N, H123Y, S146C, D147Y, E155V, I156F, and K157N. In some embodiments, the adenosine deaminase comprises the following combination of mutations relative to TadA reference sequence, where each mutation of a combination is separated by a “_” and each combination of mutations is between parentheses:

### (A106V_D108N),

### (R107C_D108N),

### (H8Y_D108N_N127S_D147Y_Q154H),

### (H8Y_R24W_D108N_N127S_D147Y_E155V),

### (D108N_D147Y_E155V),

### (H8Y_D108N_N127S),

### (H8Y_D108N_N127S_D147Y_Q154H),

### (A106V_D108N_D147Y_E155V),

### (D108Q_D147Y_E155V),

### (D108M_D147Y_E155V),

### (D108L_D147Y_E155V),

### (D108K_D147Y_E155V),

### (D108I_D147Y_E155V),

### (D108F_D147Y_E155V),

### (A106V_D108N_D147Y),

### (A106V_D108M_D147Y_E155V),

### (E59A_A106V_D108N_D147Y_E155V),

[0535] (E59A cat dead_A106V_D108N_D147Y_E155V),

### (L84F_A106V_D108N_H123Y_D147Y_E155V_I156Y),

### (L84F_A106V_D108N_H123Y_D147Y_E155V_I156F),

### (D103A_D104N),

### (G22P_D103A_D104N),

### (G22P_D103A_D104N_S138 A),

### (D103A_D104N_S138A),

### (R26G_L84F_A106V_R107H_D108N_H123Y_A142N_A143D_D147Y_E155V_I156F),

### (E25G R26G_L84F_A106V_R107H_D108N_H123Y_A142N_A143D_D147Y_E155V_I156F),

### (E25D_R26G_L84F_A106V_R107K_D108N_H123Y_A142N_A143G_D147Y_E155V_I156F),

### (R26Q_L84F_A106V_D108N_H123Y_A142N_D147Y_E155V_I156F),

### (E25M_R26G_L84F_A106V_R107P_D108N_H123Y_A142N_A143D_D147Y_E155V_I156F),

### (R26C_L84F_A106V_R107H_D108N_H123Y_A142N_D147Y_E155V_I156F),

### (L84F_A106V_D108N_H123Y_A142N_A143L_D147Y_E155V_I156F),

### (R26G_L84F_A106V_D108N_H123Y_A142N_D147Y_E155V_I156F),

### (E25A_R26G_L84F_A106V_R107N_D108N_H123Y_A142N_A143E_D147Y_E155V_I156F),

### (R26G_L84F_A106V_R107H_D108N_H123Y_A142N_A143D_D147Y_E155V_I156F),

### (A106V_D108N_A142N_D147Y_E155V),

### (R26G_A106V_D108N_A142N_D147Y_E155V),

### (E25D_R26G_A106V_R107K_D108N_A142N_A143G_D147Y_E155V),

### (R26G_A106V_D108N_R107H_A142N_A143D_D147Y_E155V),

### (E25D_R26G_A106V_D108N_A142N_D147Y_E155V),

### (A106V_R107K_D108N_A142N_D147Y_E155V),

### (A106V_D108N_A142N_A143G_D147Y_E155V),

### (A106V_D108N_A142N_A143L_D147Y_E155V),

### (H36L_R51L_L84F_A106V_D108N_H123Y_S146C_D147Y_E155V_I156F_K157N),

### (N37T_P48T_M70L_L84F_A106V_D108N_H123Y_D147Y_I49V_E155V_I156F),

### (N37S_L84F_A106V_D108N_H123Y_D147Y_E155V_I156F_K161T),

### (H36L_L84F_A106V_D108N_H123Y_D147Y_Q154H_E155V_I156F),

### (N72S_L84F_A106V_D108N_H123Y_S146R_D147Y_E155V_I156F),

### (H36L_P48L_L84F_A106V_D108N_H123Y_E134G_D147Y_E155V_I156F),

### (H36L_L84F_A106V_D108N_H123Y_D147Y_E155V_I156F_K157N),

### (H36L_L84F_A106V_D108N_H123Y_S146C_D147Y_E155V_I156F),

### (L84F_A106V_D108N_H123Y_S146R_D147Y_E155V_I156F_K161T),

### (N37S_R51H_D77G_L84F_A106V_D108N_H123Y_D147Y_E155V_I156F),

### (R51L_L84F_A106V_D108N_H123Y_D147Y_E155V_I156F_K157N),

### (D24G_Q71R_L84F_H96L_A106V_D108N_H123Y_D147Y_E155V_I156F_K160E),

### (H36L_G67V_L84F_A106V_D108N_H123Y_S146T_D147Y_E155V_I156F),

### (Q71L_L84F_A106V_D108N_H123Y_L137M_A143E_D147Y_E155V_I156F),

### (E25G_L84F_A106V_D108N_H123Y_D147Y_E155V_I156F_Q159L),

### (L84F_A91T_F104I_A106V_D108N_H123Y_D147Y_E155V_I156F),

### (N72D_L84F_A106V_D108N_H123Y_G125A_D147Y_E155V_I156F),

### (P48S_L84F_S97C_A106V_D108N_H123Y_D147Y_E155V_I156F),

### (W23G_L84F_A106V_D108N_H123Y_D147Y_E155V_I156F),

### (D24G_P48L_Q71R_L84F_A106V_D108N_H123Y_D147Y_E155V_I156F_Q159L),

### (L84F_A106V_D108N_H123Y_A142N_D147Y_E155V_I156F),

### (H36L_R51L_L84F_A106V_D108N_H123Y_A142N_S146C_D147Y_E155V_I156F_K157N), (N37S_L84F_A106V_D108N_H123Y_A142N_D147Y_E155V_I156F_K161T),

### (L84F_A106V_D108N_D147Y_E155V_I156F),

### (R51L_L84F_A106V_D108N_H123Y_S146C_D147Y_E155V_I156F_K157N_K161T),

### (L84F_A106V_D108N_H123Y_S146C_D147Y_E155V_I156F_K161T),

### (L84F_A106V_D108N_H123Y_S146C_D147Y_E155V_I156F_K157N_K160E_K161T),

### (L84F_A106V_D108N_H123Y_S146C_D147Y_E155V_I156F_K157N_K160E),

### (R74Q_L84F_A106V_D108N_H123Y_D147Y_E155V_I156F),

### (R74A_L84F_A106V_D108N_H123Y_D147Y_E155V_I156F),

### (L84F_A106V_D108N_H123Y_D147Y_E155V_I156F),

### (R74Q_L84F_A106V_D108N_H123Y_D147Y_E155V_I156F),

### (L84F_R98Q_A106V_D108N_H123Y_D147Y_E155V_I156F),

### (L84F_A106V_D108N_H123Y_R129Q_D147Y_E155V_I156F),

### (P48S_L84F_A106V_D108N_H123Y_A142N_D147Y_E155V_I156F),

### (P48S_A142N),

### (P48T_I49V_L84F_A106V_D108N_H123Y_A142N_D147Y_E155V_I156F L157N),

### (P48T_I49V_A142N),

### (H36L_P48S_R51L_L84F_A106V_D108N_H123Y_S146C_D147Y_E155V_I156F_K157N),

### (H36L_P48S_R51L_L84F_A106V_D108N_H123Y_S146C_A142N_D147Y_E155V_I156F (H36L_P48T_I49V_R51L_L84F_A106V_D108N_H123Y_S146C_D147Y_E155V_I156F_K157N),

### (H36L_P48T_I49V_R51L_L84F_A106V_D108N_H123Y_A142N_S146C_D147Y_E155V_I156F_K157N),

### (H36L_P48A_R51L_L84F_A106V_D108N_H123Y_S146C_D147Y_E155V_I156F_K157N),

### (H36L_P48A_R51L_L84F_A106V_D108N_H123Y_A142N_S146C_D147Y_E155V_I156F_K157N),

### (H36L_P48A_R51L_L84F_A106V_D108N_H123Y_S146C_A142N_D147Y_E155V_I156F_K157N),

### (W23L_H36L_P48A_R51L_L84F_A106V_D108N_H123Y_S146C_D147Y_E155V_I156F_K157N),

### (W23R_H36L_P48A_R51L_L84F_A106V_D108N_H123Y_S146C_D147Y_E155V_I156F_K157N),

### (W23L_H36L_P48A_R51L_L84F_A106V_D108N_H123Y_S146R_D147Y_E155V_I156F_K161T),

### (H36L_P48A_R51L_L84F_A106V_D108N_H123Y_S146C_D147Y_R152H_E155V_I156F_K157N),

### (H36L_P48A_R51L_L84F_A106V_D108N_H123Y_S146C_D147Y_R152P_E155V_I156F K157N),

### (W23L_H36L_P48A_R51L_L84F_A106V_D108N_H123Y_S146C_D147Y_R152P_E155V_I156F_K157N),

### (W23L_H36L_P48A_R51L_L84F_A106V_D108N_H123Y_A142A_S146C_D147Y_E155V_I156F_K157N),

### (W23L_H36L_P48A_R51L_L84F_A106V_D108N_H123Y_A142A_S146C_D147Y_R152P_E155V_I156F_K157N),

### (W23L_H36L_P48A_R51L_L84F_A106V_D108N_H123Y_S146R_D147Y_E155V_I156F_K161T),

### (W23R_H36L_P48A_R51L_L84F_A106V_D108N_H123Y_S146C_D147Y_R152P_E155V_I156F_K157N),

### (H36L_P48A_R51L_L84F_A106V_D108N_H123Y_A142N_S146C_D147Y_R152P_E155V_I156F_K157N).

[0536] In certain embodiments, the fusion proteins provided herein comprise one or more features that improve the base editing activity of the fusion proteins. For example, any of the fusion proteins provided herein may comprise a Cas9 domain that has reduced nuclease activity. In some embodiments, any of the fusion proteins provided herein may have a Cas9 domain that does not have nuclease activity (dCas9), or a Cas9 domain that cuts one strand of a duplexed DNA molecule, referred to as a Cas9 nickase (nCas9).

### Adenosine Deaminases

[0537] In some embodiments, the fusion proteins of the invention comprise an adenosine deaminase. In some embodiments, the adenosine deaminases provided herein are capable of deaminating adenine. In some embodiments, the adenosine deaminases provided herein are capable of deaminating adenine in a deoxyadenosine residue of DNA. The adenosine deaminase may be derived from any suitable organism (e.g., E. coli). In some embodiments, the adenine deaminase is a naturally-occurring adenosine deaminase that includes one or more mutations corresponding to any of the mutations provided herein (e.g., mutations in ecTadA). One of skill in the art will be able to identify the corresponding residue in any homologous protein, e.g., by sequence alignment and determination of homologous residues. Accordingly, one of skill in the art would be able to generate mutations in any naturally-occurring adenosine deaminase (e.g., having homology to ecTadA) that corresponds to any of the mutations described herein, e.g., any of the mutations identified in ecTadA. In some embodiments, the adenosine deaminase is from a prokaryote. In some embodiments, the adenosine deaminase is from a bacterium. In some embodiments, the adenosine deaminase is from Escherichia coli, Staphylococcus aureus, Salmonella typhi, Shewanella putrefaciens, Haemophilus influenzae, Caulobacter crescentus, or Bacillus subtilis. In some embodiments, the adenosine deaminase is from E. coli.

[0538] Also provided herein are adenosine deaminase variants that have increased efficiency (>50-60%) and specificity. In particular, the adenosine deaminase variants described herein are more likely to edit a desired base within a polynucleotide, and are less likely to edit bases that are not intended to be altered (i.e., “bystanders”). In some embodiments, the nucleobase editors of the invention are adenosine deaminase variants comprising an alteration in the following sequence:

MSEVEFSHEYWMRHALTLAKRARDEREVPVG
AVLVLNNRVIGEGWNRAIGLHDPTAHAEIMA
LRQGGLVMQNYRLIDATLYVTFEPCVMCAGA
MIHSRIGRVVFGVRNAKTGAAGSLMDVLHYP
GMNHRVEITEGILADECAALLCYFFRMPRQV
FNAQKKAQSSTD

(also termed TadA*7.10). In particular embodiments, TadA*7.10 comprises one or more of the following alterations: Y147T, Y147R, Q154S, Y123H, V82S, T166R, and Q154R. The alteration Y123H refers to the alteration H123Y in TadA*7.10 reverted back to Y123H TadA (wt). In other embodiments, the TadA*7.10 comprises the following alterations: Y147R+Q154R+Y123H; Y147R+Q154R+I76Y; Y147R+Q154R+T166R; Y147T+Q154R; Y147T+Q154S; V82S+Q154S; and Y123H+Y147R+Q154R+I76Y. In particular embodiments, an adenosine deaminase variant comprises a deletion of the C-terminus beginning at residue 149, 150, 151, 152, 153, 154, 155, 156, and 157.

[0539] In other embodiments, a base editor is a monomer comprising an adenosine deaminase variant (e.g., TadA*8) comprising one or more of the following alterations: Y147T, Y147R, Q154S, Y123H, V82S, T166R, Q154R. In other embodiments, the adenosine deaminase variant (TadA*8) is a monomer comprising the following alterations: Y147R+Q154R+Y123H; Y147R+Q154R+I76Y; Y147R+Q154R+T166R; Y147T+Q154R; Y147T+Q154S; V82S+Q154S; and Y123H+Y147R+Q154R+I76Y. In other embodiments, a base editor is a heterodimer comprising a wild-type adenosine deaminase and an adenosine deaminase variant (e.g., TadA*8) comprising one or more of the following alterations Y147T, Y147R, Q154S, Y123H, V82S, T166R, Q154R. In other embodiments, the base editor is a heterodimer comprising a TadA*7.10 domain and an adenosine deaminase variant domain (e.g., TadA*8) comprising the following alterations: Y147R+Q154R+Y123H; Y147R+Q154R+I76Y; Y147R+Q154R+T166R; Y147T+Q154R; Y147T+Q154S; V82S+Q154S; and Y123H+Y147R+Q154R+I76Y.

[0540] In one embodiment, an adenosine deaminase is a TadA*8 that comprises or consists essentially of the following sequence or a fragment thereof having adenosine deaminase activity:

MSEVEFSHEYWMRHALTLAKRARDEREVPVG
AVLVLNNRVIGEGWNRAIGLHDPTAHAEIMA
LRQGGLVMQNYRLIDATLYVTFEPCVMCAGA
MIHSRIGRVVFGVRNAKTGAAGSLMDVLHYP
GMNHRVEITEGILADECAALLCTFFRMPRQV
FNAQKKAQSSTD

[0541] In some embodiments, the TadA*8 is truncated. In some embodiments, the truncated TadA*8 is missing 1, 2, 3, 4, 5, 6, 7, 8, 9, 10, 11, 12, 13, 14, 15, 6, 17, 18, 19, or 20 N-terminal amino acid residues relative to the full length TadA*8. In some embodiments, the truncated TadA*8 is missing 1, 2, 3, 4, 5, 6, 7, 8, 9, 10, 11, 12, 13, 14, 15, 6, 17, 18, 19, or 20 C-terminal amino acid residues relative to the full length TadA*8. In some embodiments the adenosine deaminase variant is a full-length TadA*8.

[0542] In some embodiments the TadA*8 is TadA*8.1, TadA*8.2, TadA*8.3, TadA*8.4, TadA*8.5, TadA*8.6, TadA*8.6, TadA*8.7, TadA*8.8, TadA*8.9, TadA*8.10, TadA*8.11, TadA*8.12, TadA*8.13, TadA*8.14, TadA*8.15, TadA*8.16, TadA*8.17, TadA*8.18, TadA*8.19, TadA*8.20, TadA*8.21, TadA*8.22, TadA*8.23, TadA*8.24, TadA*8.25, or TadA*8.26.

[0543] In other embodiments, a base editor of the disclosure is a monomer comprising an adenosine deaminase variant (e.g., TadA*8) comprising one or more of the following alterations: R26C, V88A, A109S, T111R, D119N, H122N, Y147D, F149Y, T166I and/or D167N, relative to TadA*7.10, the TadA reference sequence, or a corresponding mutation in another TadA. In other embodiments, the adenosine deaminase variant (TadA*8) is a monomer comprising a combination of alterations selected from the group of: R26C+A109S+T111R+D119N+H122N+Y147D+F149Y+T166I+D167N; V88A+A109S+T111R+D119N+H122N+F149Y+T166I+D167N; R26C+A109S+T111R+D119N+H122N+F149Y+T166I+D167N; V88A+T111R+D119N+F149Y; and A109S+T111R+D119N+H122N+Y147D+F149Y+T166I+D167N, relative to TadA*7.10, the TadA reference sequence, or a corresponding mutation in another TadA.

[0544] In other embodiments, a base editor is a heterodimer comprising a wild-type adenosine deaminase and an adenosine deaminase variant (e.g., TadA*8) comprising one or more of the following alterations R26C, V88A, A109S, T111R, D119N, H122N, Y147D, F149Y, T166I and/or D167N, relative to TadA*7.10, the TadA reference sequence, or a corresponding mutation in another TadA. In other embodiments, the base editor is a heterodimer comprising a wild-type adenosine deaminase and an adenosine deaminase variant domain (e.g., TadA*8) comprising a combination of alterations selected from the group of: R26C+A109S+T111R+D119N+H122N+Y147D+F149Y+T166I+D167N; V88A+A109S+T111R+D119N+H122N+F149Y+T166I+D167N; R26C+A109S+T111R+D119N+H122N+F149Y+T166I+D167N; V88A+T111R+D119N+F149Y; and A109S+T111R+D119N+H122N+Y147D+F149Y+T166I+D167N, relative to TadA*7.10, the TadA reference sequence, or a corresponding mutation in another TadA.

[0545] In other embodiments, a base editor is a heterodimer comprising a TadA*7.10 domain and an adenosine deaminase variant (e.g., TadA*8) comprising one or more of the following alterations R26C, V88A, A109S, T111R, D119N, H122N, Y147D, F149Y, T166I and/or D167N, relative to TadA*7.10, the TadA reference sequence, or a corresponding mutation in another TadA. In other embodiments, the base editor is a heterodimer comprising a TadA*7.10 domain and an adenosine deaminase variant domain (e.g., TadA*8) comprising a combination of alterations selected from the group of: R26C+A109S+T111R+D119N+H122N+Y147D+F149Y+T166I+D167N; V88A+A109S+T111R+D119N+H122N+F149Y+T166I+D167N; R26C+A109S+T111R+D119N+H122N+F149Y+T166I+D167N; V88A+T111R+D119N+F149Y; and A109S+T111R+D119N+H122N+Y147D+F149Y+T166I+D167N, relative to TadA*7.10, the TadA reference sequence, or a corresponding mutation in another TadA.

[0546] In some embodiments, the TadA*8 is a variant as shown in Table 5A. Table 5A shows certain amino acid position numbers in the TadA amino acid sequence and the amino acids present in those positions in the TadA-7.10 adenosine deaminase. Table 5A also shows amino acid changes in TadA variants relative to TadA-7.10 following phage-assisted non-continuous evolution (PANCE) and phage-assisted continuous evolution (PACE), as described in M. Richter et al., 2020, Nature Biotechnology, doi.org/10.1038/s41587-020-0453-z, the entire contents of which are incorporated by reference herein. In some embodiments, the TadA*8 is TadA*8a, TadA*8b, TadA*8c, TadA*8d, or TadA*8e. In some embodiments, the TadA*8 is TadA*8e.

TABLE 5A
Additional TadA*8 Variants

| | | TadA amino acid number | | | | | | | | | |
|---|---|---|---|---|---|---|---|---|---|---|---|
| | TadA | 26 | 88 | 109 | 111 | 119 | 122 | 147 | 149 | 166 | 167 |
| | TadA-7.10 | R | V | A | T | D | H | Y | F | T | D |
| PANCE 1 | | | | | R | | | | | | |
| PANCE 2 | | | | S/T | R | | | | | | |
| PACE | TadA-8a | C | | S | R | N | N | D | Y | I | N |
| | TadA-8b | | A | S | R | N | N | | Y | I | N |
| | TadA-8c | C | | S | R | N | N | | Y | I | N |
| | TadA-8d | | A | | R | N | | | Y | | |
| | TadA-8e | | | S | R | N | N | D | Y | I | N |

[0547] In some embodiments, the adenosine deaminases provided herein are capable of deaminating adenine. In some embodiments, the adenosine deaminases provided herein are capable of deaminating adenine in a deoxyadenosine residue of DNA. In some embodiments, the adenine deaminase is a naturally-occurring adenosine deaminase that includes one or more mutations corresponding to any of the mutations provided herein (e.g., mutations in ecTadA). One of skill in the art will be able to identify the corresponding residue in any homologous protein, e.g., by sequence alignment and determination of homologous residues. Accordingly, one of skill in the art would be able to generate mutations in any naturally-occurring adenosine deaminase (e.g., having homology to ecTadA) that corresponds to any of the mutations described herein, e.g., any of the mutations identified in ecTadA.

[0548] In some embodiments, adenosine deaminase base editors with specificity for NGT PAM may be generated as provided in Table 5B below.

TABLE 5B
NGT PAM variants

| | NGTN | | | | | | | |
|---|---|---|---|---|---|---|---|---|
| | variant | D1135 | S1136 | G1218 | E1219 | A1322R | R1335 | T1337 |
| Variant | LRKIQK | L | R | K | I | — | Q | K |
| 1 | | | | | | | | |
| Variant | LRSVQK | L | R | S | V | — | Q | K |
| 2 | | | | | | | | |
| Variant | LRSVQL | L | R | S | V | — | Q | L |
| 3 | | | | | | | | |
| Variant | LRKIRQK | L | R | K | I | R | Q | K |
| 4 | | | | | | | | |
| Variant | LRSVRQK | L | R | S | V | R | Q | K |
| 5 | | | | | | | | |
| Variant | LRSVRQL | L | R | S | V | R | Q | L |
| 6 | | | | | | | | |

[0549] In some embodiments the NGTN variant is variant 1. In some embodiments, the NGTN variant is variant 2. In some embodiments, the NGTN variant is variant 3. In some embodiments, the NGTN variant is variant 4. In some embodiments, the NGTN variant is variant 5. In some embodiments, the NGTN variant is variant 6.

[0550] In one embodiment, a fusion protein of the invention comprises a wild-type TadA that is linked to an adenosine deaminase variant described herein (e.g., TadA*8), which is linked to Cas9 nickase. In particular embodiments, the fusion proteins comprise a single TadA*8 domain (e.g., provided as a monomer). In other embodiments, the base editor comprises TadA*8 and TadA (wt), which are capable of forming heterodimers. Exemplary TadA amino acid sequences include the following:

MSEVEFSHEYWMRHALTLAKRAWDEREVPVG
AVLVHNNRVIGEGWNRPIGRHDPTAHAEIMA
LRQGGLVMQNYRLIDATLYVTLEPCVMCAGA
MIHSRIGRVVFGARDAKTGAAGSLMDVLHHP
GMNHRVEITEGILADECAALLSDFFRMRRQE
IKAQKKAQSSTD
TadA*7.10:
MSEVEFSHEYWMRHALTLAKRARDEREVPVG
AVLVLNNRVIGEGWNRAIGLHDPTAHAEIMA
LRQGGLVMQNYRLIDATLYVTFEPCVMCAGA
MIHSRIGRVVFGVRNAKTGAAGSLMDVLHYP
GMNHRVEITEGILADECAALLCYFFRMPRQV
FNAQKKAQSSTD
TadA*8:
MSEVEFSHEYWMRHALTLAKRARDEREVPVG
AVLVLNNRVIGEGWNRAIGLHDPTAHAEIMA
LRQGGLVMQNYRLIDATLYVTFEPCVMCAGA
MIHSRIGRVVFGVRNAKTGAAGSLMDVLHYP
GMNHRVEITEGILADECAALLCTFFRMPRQV
FNAQKKAQSSTD.

[0551] In some embodiments, the adenosine deaminase comprises an amino acid sequence that is at least 60%, at least 65%, at least 70%, at least 75%, at least 80%, at least 85%, at least 90%, at least 95%, at least 96%, at least 97%, at least 98%, at least 99%, or at least 99.5% identical to any one of the amino acid sequences set forth in any of the adenosine deaminases provided herein. It should be appreciated that adenosine deaminases provided herein may include one or more mutations (e.g., any of the mutations provided herein). The disclosure provides any deaminase domains with a certain percent identity plus any of the mutations or combinations thereof described herein. In some embodiments, the adenosine deaminase comprises an amino acid sequence that has 1, 2, 3, 4, 5, 6, 7, 8, 9, 10, 11, 12, 13, 14, 15, 16, 17, 18, 19, 20, 21, 22, 23, 24, 25, 26, 27, 28, 29, 30, 31, 32, 33, 34, 35, 36, 37, 38, 39, 40, 41, 42, 43, 44, 45, 46, 47, 48, 49, 50, or more mutations compared to a reference sequence, or any of the adenosine deaminases provided herein. In some embodiments, the adenosine deaminase comprises an amino acid sequence that has at least 5, at least 10, at least 15, at least 20, at least 25, at least 30, at least 35, at least 40, at least 45, at least 50, at least 60, at least 70, at least 80, at least 90, at least 100, at least 110, at least 120, at least 130, at least 140, at least 150, at least 160, or at least 170 identical contiguous amino acid residues as compared to any one of the amino acid sequences known in the art or described herein.

[0552] In particular embodiments, a TadA*8 comprises one or more mutations at any of the following positions shown in bold. In other embodiments, a TadA*8 comprises one or more mutations at any of the positions shown with underlining:

MSEVEFSHEY WMRHALTLAK RARDEREVPV GAVLVLNNRV IGEGWNRAIG 50
LHDPTAHAEI MALRQGGLVM QN [symbol] RLIDATL Y [symbol] TFEPCVMC AGAMIHSRIG 100
RVVFGVRNAK TGAAGSLMDV LH [symbol] PGMNHRV EITEGILADE CAALLC [symbol] FFR 150
MPR [symbol] VFNAQK KAQSS [symbol] D

[0553] For example, the TadA*8 comprises alterations at amino acid position 82 and/or 166 (e.g., V82S, T166R) alone or in combination with any one or more of the following Y147T, Y147R, Q154S, Y123H, and Q154R. In particular embodiments, the following alterations are made Y147R+Q154R+Y123H; Y147R+Q154R+I76Y; Y147R+Q154R+T166R; Y147T+Q154R; Y147T+Q154S; V82S+Q154S; and Y123H+Y147R+Q154R+I76Y. In some embodiments, the adenosine deaminase is TadA*8, which comprises or consists essentially of the following sequence or a fragment thereof having adenosine deaminase activity:

MSEVEFSHEY WMRHALTLAK RARDEREVPV
GAVLVLNNRV IGEGWNRAIG LHDPTAHAEI
MALRQGGLVM QNYRLIDATL YVTFEPCVMC
AGAMIHSRIG RVVFGVRNAK TGAAGSLMDV
LHYPGMNHRV EITEGILADE CAALLCTFFR
MPRQVFNAQK KAQSSTD

[0554] In some embodiments, the TadA*8 is truncated. In some embodiments, the truncated TadA*8 is missing 1, 2, 3, 4, 5, 6, 7, 8, 9, 10, 11, 12, 13, 14, 15, 6, 17, 18, 19, or 20 N-terminal amino acid residues relative to the full length TadA*8. In some embodiments, the truncated TadA*8 is missing 1, 2, 3, 4, 5, 6, 7, 8, 9, 10, 11, 12, 13, 14, 15, 6, 17, 18, 19, or 20 C-terminal amino acid residues relative to the full length TadA*8. In some embodiments the adenosine deaminase variant is a full-length TadA*8.

[0555] In one embodiment, a fusion protein of the invention comprises a wild-type TadA is linked to an adenosine deaminase variant described herein (e.g., TadA*8), which is linked to Cas9 nickase. In particular embodiments, the fusion proteins comprise a single TadA*8 domain (e.g., provided as a monomer). In other embodiments, the base editor comprises TadA*8 and TadA (wt), which are capable of forming heterodimers.

### C to T Editing

[0556] In some embodiments, a base editor disclosed herein comprises a fusion protein comprising deaminase capable of deaminating a target cytidine (C) base of a polynucleotide to produce uridine (U), which has the base pairing properties of thymine. In some embodiments, for example where the polynucleotide is double-stranded (e.g., DNA), the uridine base can then be substituted with a thymidine base (e.g., by cellular repair machinery) to give rise to a C:G to a T:A transition. In other embodiments, deamination of a C to U in a nucleic acid by a base editor cannot be accompanied by substitution of the U to a T.

[0557] The deamination of a target C in a polynucleotide to give rise to a U is a non-limiting example of a type of base editing that can be executed by a base editor described herein. In another example, a base editor comprising a cytidine deaminase domain can mediate conversion of a cytosine (C) base to a guanine (G) base. For example, a U of a polynucleotide produced by deamination of a cytidine by a cytidine deaminase domain of a base editor can be excised from the polynucleotide by a base excision repair mechanism (e.g., by a uracil DNA glycosylase (UDG) domain), producing an abasic site. The nucleobase opposite the abasic site can then be substituted (e.g., by base repair machinery) with another base, such as a C, by for example a translesion polymerase. Although it is typical for a nucleobase opposite an abasic site to be replaced with a C, other substitutions (e.g., A, G or T) can also occur.

[0558] Accordingly, in some embodiments a base editor described herein comprises a deamination domain (e.g., cytidine deaminase domain) capable of deaminating a target C to a U in a polynucleotide. Further, as described below, the base editor can comprise additional domains which facilitate conversion of the U resulting from deamination to, in some embodiments, a T or a G. For example, a base editor comprising a cytidine deaminase domain can further comprise a uracil glycosylase inhibitor (UGI) domain to mediate substitution of a U by a T, completing a C-to-T base editing event. In another example, a base editor can incorporate a translesion polymerase to improve the efficiency of C-to-G base editing, since a translesion polymerase can facilitate incorporation of a C opposite an abasic site (i.e., resulting in incorporation of a G at the abasic site, completing the C-to-G base editing event).

[0559] A base editor comprising a cytidine deaminase as a domain can deaminate a target C in any polynucleotide, including DNA, RNA and DNA-RNA hybrids. Typically, a cytidine deaminase catalyzes a C nucleobase that is positioned in the context of a single-stranded portion of a polynucleotide. In some embodiments, the entire polynucleotide comprising a target C can be single-stranded. For example, a cytidine deaminase incorporated into the base editor can deaminate a target C in a single-stranded RNA polynucleotide. In other embodiments, a base editor comprising a cytidine deaminase domain can act on a double-stranded polynucleotide, but the target C can be positioned in a portion of the polynucleotide which at the time of the deamination reaction is in a single-stranded state. For example, in embodiments where the NAGPB domain comprises a Cas9 domain, several nucleotides can be left unpaired during formation of the Cas9-gRNA-target DNA complex, resulting in formation of a Cas9 “R-loop complex”. These unpaired nucleotides can form a bubble of single-stranded DNA that can serve as a substrate for a single-strand specific nucleotide deaminase enzyme (e.g., cytidine deaminase).

[0560] In some embodiments, a cytidine deaminase of a base editor can comprise all or a portion of an apolipoprotein B mRNA editing complex (APOBEC) family deaminase. APOBEC is a family of evolutionarily conserved cytidine deaminases. Members of this family are C-to-U editing enzymes. The N-terminal domain of APOBEC like proteins is the catalytic domain, while the C-terminal domain is a pseudocatalytic domain. More specifically, the catalytic domain is a zinc dependent cytidine deaminase domain and is important for cytidine deamination. APOBEC family members include APOBEC1, APOBEC2, APOBEC3A, APOBEC3B, APOBEC3C, APOBEC3D (“APOBEC3E” now refers to this), APOBEC3F, APOBEC3G, APOBEC3H, APOBEC→, and Activation-induced (cytidine) deaminase. In some embodiments, the APOBEC family members include rAPOBEC1, BE4 in which the APOBEC1 sequence is replaced with rAPOBEC1, PpAPOBEC1, BE4 in which the APOBEC1 sequence is replaced with PpABOBEC1, PpAPOBEC1 containing an H122A substitution, BE4 in which the APOBEC1 sequence is replaced with PpAPOBEC1 containing an H122A substitution; BE4 in which the APOBEC1 sequence is replaced with RrA3F containing an F130L substitution; BE4 in which the APOBEC1 sequence is replaced with AmAPOBEC1; BE4 in which the APOBEC1 sequence is replaced with SsAPOBEC2. In some embodiments, a deaminase incorporated into a base editor comprises all or a portion of an APOBEC1 deaminase. In some embodiments, a deaminase incorporated into a base editor comprises all or a portion of APOBEC2 deaminase. In some embodiments, a deaminase incorporated into a base editor comprises all or a portion of is an APOBEC3 deaminase. In some embodiments, a deaminase incorporated into a base editor comprises all or a portion of an APOBEC3A deaminase. In some embodiments, a deaminase incorporated into a base editor comprises all or a portion of APOBEC3B deaminase. In some embodiments, a deaminase incorporated into a base editor comprises all or a portion of APOBEC3C deaminase. In some embodiments, a deaminase incorporated into a base editor comprises all or a portion of APOBEC3D deaminase. In some embodiments, a deaminase incorporated into a base editor comprises all or a portion of APOBEC3E deaminase. In some embodiments, a deaminase incorporated into a base editor comprises all or a portion of APOBEC3F deaminase. In some embodiments, a deaminase incorporated into a base editor comprises all or a portion of APOBEC3G deaminase. In some embodiments, a deaminase incorporated into a base editor comprises all or a portion of APOBEC3H deaminase. In some embodiments, a deaminase incorporated into a base editor comprises all or a portion of APOBEC4 deaminase. In some embodiments, a deaminase incorporated into a base editor comprises all or a portion of activation-induced deaminase (AID). In some embodiments a deaminase incorporated into a base editor comprises all or a portion of cytidine deaminase 1 (CDA1). It should be appreciated that a base editor can comprise a deaminase from any suitable organism (e.g., a human or a rat). In some embodiments, a deaminase domain of a base editor is from a human, chimpanzee, gorilla, monkey, cow, dog, rat, or mouse. In some embodiments, the deaminase domain of the base editor is derived from rat (e.g., rat APOBEC1). In some embodiments, the deaminase domain of the base editor is human APOBEC1. In some embodiments, the deaminase domain of the base editor is pmCDA1.

[0561] The amino acid and nucleic acid sequences of PmCDA1 are shown herein below.

>tr|A5H718|A5H718_PETMA Cytosine dcaininase
OS = Petromyzon marinus
OX = 7757 PE = 2 SV = 1 amino acid sequence:
MTDAEYVRIHEKLDIYTFKKQFFNNKKSVSH
RCYVLFELKRRGERRACFWGYAVNKPQSGTE
RGIHAEIFSIRKVEEYLRDNPGQFTINWYSS
WSPCADCAEKILEWYNQELRGNGHTLKIWAC
KLYYEKNARNQIGLWNLRDNGVGLNVMVSEH
YQCCRKIFIQSSHNQLNENRWLEKTLKRAEK
RRSELSIMIQVKILHTTKSPAV
Nucleic acid sequence: >EF094822.1
Petromvzon marinus isolate PmCDA.21
cytosine deaminase mRNA, complete cds:
TGACACGACACAGCCGTGTATATGAGGAAGG
GTAGCTGGATGGGGGGGGGGGGAATACGTTC
AGAGAGGACATTAGCGAGCGTCTTGTTGGTG
GCCTTGAGTCTAGACACCTGCAGACATGACC
GACGCTGAGTACGTGAGAATCCATGAGAAGT
TGGACATCTACACGTTTAAGAAACAGTTTTT
CAACAACAAAAAATCCGTGTCGCATAGATGC
TACGTTCTCTTTGAATTAAAACGACGGGGTG
AACGTAGAGCGTGTTTTTGGGGCTATGCTGT
GAATAAACCACAGAGCGGGACAGAACGTGGA
ATTCACGCCGAAATCTTTAGCATTAGAAAAG
TCGAAGAATACCTGCGCGACAACCCCGGACA
ATTCACGATAAATTGGTACTCATCCTGGAGT
CCTTGTGCAGATTGCGCTGAAAAGATCTTAG
AATGGTATAACCAGGAGCTGCGGGGGAACGG
CCACACTTTGAAAATCTGGGCTTGCAAACTC
TATTACGAGAAAAATGCGAGGAATCAAATTG
GGCTGTGGAACCTCAGAGATAACGGGGTTGG
GTTGAATGTAATGGTAAGTGAACACTACCAA
TGTTGCAGGAAAATATTCATCCAATCGTCGC
ACAATCAATTGAATGAGAATAGATGGCTTGA
GAAGACTTTGAAGCGAGCTGAAAAACGACGG
AGCGAGTTGTCCATTATGATTCAGGTAAAAA
TACTCCACACCACTAAGAGTCCTGCTGTTTA
AGAGGCTATGCGGATGGTTTTC

[0562] The amino acid and nucleic acid sequences of the coding sequence (CDS) of human activation-induced cytidine deaminase (AID) are shown below.

>tr|Q6QJ80|Q6QJ80_HUMAN Activation-induced
cytidine deaminase OS = Homo sapiens
OX = 9606 GN = AICDA PE = 2 SV = 1
amino acid sequence:
MDSLLMNRRKFLYQFKNVRWAKGRRETYLC
YVVKRRDSATSFSLDFGYLRNKNGCHVELL
FLRYISDWDLDPGRCYRVTWFTSWSPCYDC
ARHVADFLRGNPNLSLRIFTARLYFCEDRK
AEPEGLRRLHRAGVQIAIMTFKAPV

[0563] The amino acid and nucleic acid sequences of the coding sequence (CDS) of human activation-induced cytidine deaminase (AID) are shown below.

>tr|Q6QJ80|Q6QJ80_HUMAN Activation-induced
cytidine deaminase OS = Homo sapiens
OX = 9606 GN = AICDA PE = 2 SV = 1
amino acid sequence:
MDSLLMNRRKFLYQFKNVRWAKGRRETYLCYVVKRRDSAT
SFSLDFGYLRNKNGCHVELLFLRYISDWDLDPGRCYRVTW
FTSWSPCYDCARHVADFLRGNPNLSLRIFTARLYFCEDRK
AEPEGLRRLHRAGVQIAIMTFKAPV
Nucleic acid sequence:
>NG_011588.1:5001-15681 Homo sapiens activation
induced cytidine deaminase (AICDA),
RefSeqGene (LRG_17) on chromosome 12:
AGAGAACCATCATTAATTGAAGTGAGATTTTTCTGGCCTG
AGACTTGCAGGGAGGCAAGAAGACACTCTGGACACCACTA
TGGACAGGTAAAGAGGCAGTCTTCTCGTGGGTGATTGCAC
TGGCCTTCCTCTCAGAGCAAATCTGAGTAATGAGACTGGT
AGCTATCCCTTTCTCTCATGTAACTGTCTGACTGATAAGA
TCAGCTTGATCAATATGCATATATATTTTTTGATCTGTCT
CCTTTTCTTCTATTCAGATCTTATACGCTGTCAGCCCAAT
TCTTTCTGTTTCAGACTTCTCTTGATTTCCCTCTTTTTCA
TGTGGCAAAAGAAGTAGTGCGTACAATGTACTGATTCGTC
CTGAGATTTGTACCATGGTTGAAACTAATTTATGGTAATA
ATATTAACATAGCAAATCTTTAGAGACTCAAATCATGAAA
AGGTAATAGCAGTACTGTACTAAAAACGGTAGTGCTAATT
TTCGTAATAATTTTGTAAATATTCAACAGTAAAACAACTT
GAAGACACACTTTCCTAGGGAGGCGTTACTGAAATAATTT
AGCTATAGTAAGAAAATTTGTAATTTTAGAAATGCCAAGC
ATTCTAAATTAATTGCTTGAAAGTCACTATGATTGTGTCC
ATTATAAGGAGACAAATTCATTCAAGCAAGTTATTTAATG
TTAAAGGCCCAATTGTTAGGCAGTTAATGGCACTTTTACT
ATTAACTAATCTTTCCATTTGTTCAGACGTAGCTTAACTT
ACCTCTTAGGTGTGAATTTGGTTAAGGTCCTCATAATGTC
TTTATGTGCAGTTTTTGATAGGTTATTGTCATAGAACTTA
TTCTATTCCTACATTTATGATTACTATGGATGTATGAGAA
TAACACCTAATCCTTATACTTTACCTCAATTTAACTCCTT
TATAAAGAACTTACATTACAGAATAAAGATTTTTTAAAAA
TATATTTTTTTGTAGAGACAGGGTCTTAGCCCAGCCGAGG
CTGGTCTCTAAGTCCTGGCCCAAGCGATCCTCCTGCCTGG
GCCTCCTAAAGTGCTGGAATTATAGACATGAGCCATCACA
TCCAATATACAGAATAAAGATTTTTAATGGAGGATTTAAT
GTTCTTCAGAAAATTTTCTTGAGGTCAGACAATGTCAAAT
GTCTCCTCAGTTTACACTGAGATTTTGAAAACAAGTCTGA
GCTATAGGTCCTTGTGAAGGGTCCATTGGAAATACTTGTT
CAAAGTAAAATGGAAAGCAAAGGTAAAATCAGCAGTTGAA
ATTCAGAGAAAGACAGAAAAGGAGAAAAGATGAAATTCAA
CAGGACAGAAGGGAAATATATTATCATTAAGGAGGACAGT
ATCTGTAGAGCTCATTAGTGATGGCAAAATGACTTGGTCA
GGATTATTTTTAACCCGCTTGTTTCTGGTTTGCACGGCTG
GGGATGCAGCTAGGGTTCTGCCTCAGGGAGCACAGCTGTC
CAGAGCAGCTGTCAGCCTGCAAGCCTGAAACACTCCCTCG
GTAAAGTCCTTCCTACTCAGGACAGAAATGACGAGAACAG
GGAGCTGGAAACAGGCCCCTAACCAGAGAAGGGAAGTAAT
GGATCAACAAAGTTAACTAGCAGGTCAGGATCACGCAATT
CATTTCACTCTGACTGGTAACATGTGACAGAAACAGTGTA
GGCTTATTGTATTTTCATGTAGAGTAGGACCCAAAAATCC
ACCCAAAGTCCTTTATCTATGCCACATCCTTCTTATCTAT
ACTTCCAGGACACTTTTTCTTCCTTATGATAAGGCTCTCT
CTCTCTCCACACACACACACACACACACACACACACACAC
ACACACACACACAAACACACACCCCGCCAACCAAGGTGCA
TGTAAAAAGATGTAGATTCCTCTGCCTTTCTCATCTACAC
AGCCCAGGAGGGTAAGTTAATATAAGAGGGATTTATTGGT
AAGAGATGATGCTTAATCTGTTTAACACTGGGCCTCAAAG
AGAGAATTTCTTTTCTTCTGTACTTATTAAGCACCTATTA
TGTGTTGAGCTTATATATACAAAGGGTTATTATATGCTAA
TATAGTAATAGTAATGGTGGTTGGTACTATGGTAATTACC
ATAAAAATTATTATCCTTTTAAAATAAAGCTAATTATTAT
TGGATCTTTTTTAGTATTCATTTTATGTTTTTTATGTTTT
TGATTTTTTAAAAGACAATCTCACCCTGTTACCCAGGCTG
GAGTGCAGTGGTGCAATCATAGCTTTCTGCAGTCTTGAAC
TCCTGGGCTCAAGCAATCCTCCTGCCTTGGCCTCCCAAAG
TGTTGGGATACAGTCATGAGCCACTGCATCTGGCCTAGGA
TCCATTTAGATTAAAATATGCATTTTAAATTTTAAAATAA
TATGGCTAATTTTTACCTTATGTAATGTGTATACTGGCAA
TAAATCTAGTTTGCTGCCTAAAGTTTAAAGTGCTTTCCAG
TAAGCTTCATGTACGTGAGGGGAGACATTTAAAGTGAAAC
AGACAGCCAGGTGTGGTGGCTCACGCCTGTAATCCCAGCA
CTCTGGGAGGCTGAGGTGGGTGGATCGCTTGAGCCCTGGA
GTTCAAGACCAGCCTGAGCAACATGGCAAAACGCTGTTTC
TATAACAAAAATTAGCCGGGCATGGTGGCATGTGCCTGTG
GTCCCAGCTACTAGGGGGCTGAGGCAGGAGAATCGTTGGA
GCCCAGGAGGTCAAGGCTGCACTGAGCAGTGCTTGCGCCA
CTGCACTCCAGCCTGGGTGACAGGACCAGACCTTGCCTCA
AAAAAATAAGAAGAAAAATTAAAAATAAATGGAAACAACT
ACAAAGAGCTGTTGTCCTAGATGAGCTACTTAGTTAGGCT
GATATTTTGGTATTTAACTTTTAAAGTCAGGGTCTGTCAC
CTGCACTACATTATTAAAATATCAATTCTCAATGTATATC
CACACAAAGACTGGTACGTGAATGTTCATAGTACCTTTAT
TCACAAAACCCCAAAGTAGAGACTATCCAAATATCCATCA
ACAAGTGAACAAATAAACAAAATGTGCTATATCCATGCAA
TGGAATACCACCCTGCAGTACAAAGAAGCTACTTGGGGAT
GAATCCCAAAGTCATGACGCTAAATGAAAGAGTCAGACAT
GAAGGAGGAGATAATGTATGCCATACGAAATTCTAGAAAA
TGAAAGTAACTTATAGTTACAGAAAGCAAATCAGGGCAGG
CATAGAGGCTCACACCTGTAATCCCAGCACTTTGAGAGGC
CACGTGGGAAGATTGCTAGAACTCAGGAGTTCAAGACCAG
CCTGGGCAACACAGTGAAACTCCATTCTCCACAAAAATGG
GAAAAAAAGAAAGCAAATCAGTGGTTGTCCTGTGGGGAGG
GGAAGGACTGCAAAGAGGGAAGAAGCTCTGGTGGGGTGAG
GGTGGTGATTCAGGTTCTGTATCCTGACTGTGGTAGCAGT
TTGGGGTGTTTACATCCAAAAATATTCGTAGAATTATGCA
TCTTAAATGGGTGGAGTTTACTGTATGTAAATTATACCTC
AATGTAAGAAAAAATAATGTGTAAGAAAACTTTCAATTCT
CTTGCCAGCAAACGTTATTCAAATTCCTGAGCCCTTTACT
TCGCAAATTCTCTGCACTTCTGCCCCGTACCATTAGGTGA
CAGCACTAGCTCCACAAATTGGATAAATGCATTTCTGGAA
AAGACTAGGGACAAAATCCAGGCATCACTTGTGCTTTCAT
ATCAACCATGCTGTACAGCTTGTGTTGCTGTCTGCAGCTG
CAATGGGGACTCTTGATTTCTTTAAGGAAACTTGGGTTAC
CAGAGTATTTCCACAAATGCTATTCAAATTAGTGCTTATG
ATATGCAAGACACTGTGCTAGGAGCCAGAAAACAAAGAGG
AGGAGAAATCAGTCATTATGTGGGAACAACATAGCAAGAT
ATTTAGATCATTTTGACTAGTTAAAAAAGCAGCAGAGTAC
AAAATCACACATGCAATCAGTATAATCCAAATCATGTAAA
TATGTGCCTGTAGAAAGACTAGAGGAATAAACACAAGAAT
CTTAACAGTCATTGTCATTAGACACTAAGTCTAATTATTA
TTATTAGACACTATGATATTTGAGATTTAAAAAATCTTTA
ATATTTTAAAATTTAGAGCTCTTCTATTTTTCCATAGTAT
TCAAGTTTGACAATGATCAAGTATTACTCTTTCTTTTTTT
TTTTTTTTTTTTTTTTTTGAGATGGAGTTTTGGTCTTGTT
GCCCATGCTGGAGTGGAATGGCATGACCATAGCTCACTGC
AACCTCCACCTCCTGGGTTCAAGCAAAGCTGTCGCCTCAG
CCTCCCGGGTAGATGGGATTACAGGCGCCCACCACCACAC
TCGGCTAATGTTTGTATTTTTAGTAGAGATGGGGTTTCAC
CATGTTGGCCAGGCTGGTCTCAAACTCCTGACCTCAGAGG
ATCCACCTGCCTCAGCCTCCCAAAGTGCTGGGATTACAGA
TGTAGGCCACTGCGCCCGGCCAAGTATTGCTCTTATACAT
TAAAAAACAGGTGTGAGCCACTGCGCCCAGCCAGGTATTG
CTCTTATACATTAAAAAATAGGCCGGTGCAGTGGCTCACG
CCTGTAATCCCAGCACTTTGGGAAGCCAAGGCGGGCAGAA
CACCCGAGGTCAGGAGTCCAAGGCCAGCCTGGCCAAGATG
GTGAAACCCCGTCTCTATTAAAAATACAAACATTACCTGG
GCATGATGGTGGGCGCCTGTAATCCCAGCTACTCAGGAGG
CTGAGGCAGGAGGATCCGCGGAGCCTGGCAGATCTGCCTG
AGCCTGGGAGGTTGAGGCTACAGTAAGCCAAGATCATGCC
AGTATACTTCAGCCTGGGCGACAAAGTGAGACCGTAACAA
AAAAAAAAAAATTTAAAAAAAGAAATTTAGATCAAGATCC
AACTGTAAAAAGTGGCCTAAACACCACATTAAAGAGTTTG
GAGTTTATTCTGCAGGCAGAAGAGAACCATCAGGGGGTCT
TCAGCATGGGAATGGCATGGTGCACCTGGTTTTTGTGAGA
TCATGGTGGTGACAGTGTGGGGAATGTTATTTTGGAGGGA
CTGGAGGCAGACAGACCGGTTAAAAGGCCAGCACAACAGA
TAAGGAGGAAGAAGATGAGGGCTTGGACCGAAGCAGAGAA
GAGCAAACAGGGAAGGTACAAATTCAAGAAATATTGGGGG
GTTTGAATCAACACATTTAGATGATTAATTAAATATGAGG
ACTGAGGAATAAGAAATGAGTCAAGGATGGTTCCAGGCTG
CTAGGCTGCTTACCTGAGGTGGCAAAGTCGGGAGGAGTGG
CAGTTTAGGACAGGGGGCAGTTGAGGAATATTGTTTTGAT
CATTTTGAGTTTGAGGTACAAGTTGGACACTTAGGTAAAG
ACTGGAGGGGAAATCTGAATATACAATTATGGGACTGAGG
AACAAGTTTATTTTATTTTTTGTTTCGTTTTCTTGTTGAA
GAACAAATTTAATTGTAATCCCAAGTCATCAGCATCTAGA
AGACAGTGGCAGGAGGTGACTGTCTTGTGGGTAAGGGTTT
GGGGTCCTTGATGAGTATCTCTCAATTGGCCTTAAATATA
AGCAGGAAAAGGAGTTTATGATGGATTCCAGGCTCAGCAG
GGCTCAGGAGGGCTCAGGCAGCCAGCAGAGGAAGTCAGAG
CATCTTCTTTGGTTTAGCCCAAGTAATGACTTCCTTAAAA
AGCTGAAGGAAAATCCAGAGTGACCAGATTATAAACTGTA
CTCTTGCATTTTCTCTCCCTCCTCTCACCCACAGCCTCTT
GATGAACCGGAGGAAGTTTCTTTACCAATTCAAAAATGTC
CGCTGGGCTAAGGGTCGGCGTGAGACCTACCTGTGCTACG
TAGTGAAGAGGCGTGACAGTGCTACATCCTTTTCACTGGA
CTTTGGTTATCTTCGCAATAAGGTATCAATTAAAGTCGGC
TTTGCAAGCAGTTTAATGGTCAACTGTGAGTGCTTTTAGA
GCCACCTGCTGATGGTATTACTTCCATCCTTTTTTGGCAT
TTGTGTCTCTATCACATTCCTCAAATCCTTTTTTTTATTT
CTTTTTCCATGTCCATGCACCCATATTAGACATGGCCCAA
AATATGTGATTTAATTCCTCCCCAGTAATGCTGGGCACCC
TAATACCACTCCTTCCTTCAGTGCCAAGAACAACTGCTCC
CAAACTGTTTACCAGCTTTCCTCAGCATCTGAATTGCCTT
TGAGATTAATTAAGCTAAAAGCATTTTTATATGGGAGAAT
ATTATCAGCTTGTCCAAGCAAAAATTTTAAATGTGAAAAA
CAAATTGTGTCTTAAGCATTTTTGAAAATTAAGGAAGAAG
AATTTGGGAAAAAATTAACGGTGGCTCAATTCTGTCTTCC
AAATGATTTCTTTTCCCTCCTACTCACATGGGTCGTAGGC
CAGTGAATACATTCAACATGGTGATCCCCAGAAAACTCAG
AGAAGCCTCGGCTGATGATTAATTAAATTGATCTTTCGGC
TACCCGAGAGAATTACATTTCCAAGAGACTTCTTCACCAA
AATCCAGATGGGTTTACATAAACTTCTGCCCACGGGTATC
TCCTCTCTCCTAACACGCTGTGACGTCTGGGCTTGGTGGA
ATCTCAGGGAAGCATCCGTGGGGTGGAAGGTCATCGTCTG
GCTCGTTGTTTGATGGTTATATTACCATGCAATTTTCTTT
GCCTACATTTGTATTGAATACATCCCAATCTCCTTCCTAT
TCGGTGACATGACACATTCTATTTCAGAAGGCTTTGATTT
TATCAAGCACTTTCATTTACTTCTCATGGCAGTGCCTATT
ACTTCTCTTACAATACCCATCTGTCTGCTTTACCAAAATC
TATTTCCCCTTTTCAGATCCTCCCAAATGGTCCTCATAAA
CTGTCCTGCCTCCACCTAGTGGTCCAGGTATATTTCCACA
ATGTTACATCAACAGGCACTTCTAGCCATTTTCCTTCTCA
AAAGGTGCAAAAAGCAACTTCATAAACACAAATTAAATCT
TCGGTGAGGTAGTGTGATGCTGCTTCCTCCCAACTCAGCG
CACTTCGTCTTCCTCATTCCACAAAAACCCATAGCCTTCC
TTCACTCTGCAGGACTAGTGCTGCCAAGGGTTCAGCTCTA
CCTACTGGTGTGCTCTTTTGAGCAAGTTGCTTAGCCTCTC
TGTAACACAAGGACAATAGCTGCAAGCATCCCCAAAGATC
ATTGCAGGAGACAATGACTAAGGCTACCAGAGCCGCAATA
AAAGTCAGTGAATTTTAGCGTGGTCCTCTCTGTCTCTCCA
GAACGGCTGCCACGTGGAATTGCTCTTCCTCCGCTACATC
TCGGACTGGGACCTAGACCCTGGCCGCTGCTACCGCGTCA
CCTGGTTCACCTCCTGGAGCCCCTGCTACGACTGTGCCCG
ACATGTGGCCGACTTTCTGCGAGGGAACCCCAACCTCAGT
CTGAGGATCTTCACCGCGCGCCTCTACTTCTGTGAGGACC
GCAAGGCTGAGCCCGAGGGGCTGCGGCGGCTGCACCGCGC
CGGGGTGCAAATAGCCATCATGACCTTCAAAGGTGCGAAA
GGGCCTTCCGCGCAGGCGCAGTGCAGCAGCCCGCATTCGG
GATTGCGATGCGGAATGAATGAGTTAGTGGGGAAGCTCGA
GGGGAAGAAGTGGGCGGGGATTCTGGTTCACCTCTGGAGC
CGAAATTAAAGATTAGAAGCAGAGAAAAGAGTGAATGGCT
CAGAGACAAGGCCCCGAGGAAATGAGAAAATGGGGCCAGG
GTTGCTTCTTTCCCCTCGATTTGGAACCTGAACTGTCTTC
TACCCCCATATCCCCGCCTTTTTTTCCTTTTTTTTTTTTT
GAAGATTATTTTTACTGCTGGAATACTTTTGTAGAAAACC
ACGAAAGAACTTTCAAAGCCTGGGAAGGGCTGCATGAAAA
TTCAGTTCGTCTCTCCAGACAGCTTCGGCGCATCCTTTTG
GTAAGGGGCTTCCTCGCTTTTTAAATTTTCTTTCTTTCTC
TACAGTCTTTTTTGGAGTTTCGTATATTTCTTATATTTTC
TTATTGTTCAATCACTCTCAGTTTTCATCTGATGAAAACT
TTATTTCTCCTCCACATCAGCTTTTTCTTCTGCTGTTTCA
CCATTCAGAGCCCTCTGCTAAGGTTCCTTTTCCCTCCCTT
TTCTTTCTTTTGTTGTTTCACATCTTTAAATTTCTGTCTC
TCCCCAGGGTTGCGTTTCCTTCCTGGTCAGAATTCTTTTC
TCCTTTTTTTTTTTTTTTTTTTTTTTTTTTAAACAAACAA
ACAAAAAACCCAAAAAAACTCTTTCCCAATTTACTTTCTT
CCAACATGTTACAAAGCCATCCACTCAGTTTAGAAGACTC
TCCGGCCCCACCGACCCCCAACCTCGTTTTGAAGCCATTC
ACTCAATTTGCTTCTCTCTTTCTCTACAGCCCCTGTATGA
GGTTGATGACTTACGAGACGCATTTCGTACTTTGGGACTT
TGATAGCAACTTCCAGGAATGTCACACACGATGAAATATC
TCTGCTGAAGACAGTGGATAAAAAACAGTCCTTCAAGTCT
TCTCTGTTTTTATTCTTCAACTCTCACTTTCTTAGAGTTT
ACAGAAAAAATATTTATATACGACTCTTTAAAAAGATCTA
TGTCTTGAAAATAGAGAAGGAACACAGGTCTGGCCAGGGA
CGTGCTGCAATTGGTGCAGTTTTGAATGCAACATTGTCCC
CTACTGGGAATAACAGAACTGCAGGACCTGGGAGCATCCT
AAAGTGTCAACGTTTTTCTATGACTTTTAGGTAGGATGAG
AGCAGAAGGTAGATCCTAAAAAGCATGGTGAGAGGATCAA
ATGTTTTTATATCAACATCCTTTATTATTTGATTCATTTG
AGTTAACAGTGGTGTTAGTGATAGATTTTTCTATTCTTTT
CCCTTGACGTTTACTTTCAAGTAACACAAACTCTTCCATC
AGGCCATGATCTATAGGACCTCCTAATGAGAGTATCTGGG
TGATTGTGACCCCAAACCATCTCTCCAAAGCATTAATATC
CAATCATGCGCTGTATGTTTTAATCAGCAGAAGCATGTTT
TTATGTTTGTACAAAAGAAGATTGTTATGGGTGGGGATGG
AGGTATAGACCATGCATGGTCACCTTCAAGCTACTTTAAT
AAAGGATCTTAAAATGGGCAGGAGGACTGTGAACAAGACA
CCCTAATAATGGGTTGATGTCTGAAGTAGCAAATCTTCTG
GAAACGCAAACTCTTTTAAGGAAGTCCCTAATTTAGAAAC
ACCCACAAACTTCACATATCATAATTAGCAAACAATTGGA
AGGAAGTTGCTTGAATGTTGGGGAGAGGAAAATCTATTGG
CTCTCGTGGGTCTCTTCATCTCAGAAATGCCAATCAGGTC
AAGGTTTGCTACATTTTGTATGTGTGTGATGCTTCTCCCA
AAGGTATATTAACTATATAAGAGAGTTGTGACAAAACAGA
ATGATAAAGCTGCGAACCGTGGCACACGCTCATAGTTCTA
GCTGCTTGGGAGGTTGAGGAGGGAGGATGGCTTGAACACA
GGTGTTCAAGGCCAGCCTGGGCAACATAACAAGATCCTGT
CTCTCAAAAAAAAAAAAAAAAAAAAGAAAGAGAGAGGGCC
GGGCGTGGTGGCTCACGCCTGTAATCCCAGCACTTTGGGA
GGCCGAGCCGGGCGGATCACCTGTGGTCAGGAGTTTGAGA
CCAGCCTGGCCAACATGGCAAAACCCCGTCTGTACTCAAA
ATGCAAAAATTAGCCAGGCGTGGTAGCAGGCACCTGTAAT
CCCAGCTACTTGGGAGGCTGAGGCAGGAGAATCGCTTGAA
CCCAGGAGGTGGAGGTTGCAGTAAGCTGAGATCGTGCCGT
TGCACTCCAGCCTGGGCGACAAGAGCAAGACTCTGTCTCA
GAAAAAAAAAAAAAAAAGAGAGAGAGAGAGAAAGAGAACA
ATATTTGGGAGAGAAGGATGGGGAAGCATTGCAAGGAAAT
TGTGCTTTATCCAACAAAATGTAAGGAGCCAATAAGGGAT
CCCTATTTGTCTCTTTTGGTGTCTATTTGTCCCTAACAAC
TGTCTTTGACAGTGAGAAAAATATTCAGAATAACCATATC
CCTGTGCCGTTATTACCTAGCAACCCTTGCAATGAAGATG
AGCAGATCCACAGGAAAACTTGAATGCACAACTGTCTTAT
TTTAATCTTATTGTACATAAGTTTGTAAAAGAGTTAAAAA
TTGTTACTTCATGTATTCATTTATATTTTATATTATTTTG
CGTCTAATGATTTTTTATTAACATGATTTCCTTTTCTGAT
ATATTGAAATGGAGTCTCAAAGCTTCATAAATTTATAACT
TTAGAAATGATTCTAATAACAACGTATGTAATTGTAACAT
TGCAGTAATGGTGCTACGAAGCCATTTCTCTTGATTTTTA
GTAAACTTTTATGACAGCAAATTTGCTTCTGGCTCACTTT
CAATCAGTTAAATAAATGATAAATAATTTTGGAAGCTGTG
AAGATAAAATACCAAATAAAATAATATAAAAGTGATTTAT
ATGAAGTTAAAATAAAAAATCAGTATGATGGAATAAACTT
G

[0564] Other exemplary deaminases that can be fused to Cas9 according to aspects of this disclosure are provided below. In embodiments, the deaminases are activation-induced deaminases (AID). In some embodiments, the deaminases are APOBEC deaminases. It should be understood that, in some embodiments, the active domain of the respective sequence can be used, e.g., the domain without a localizing signal (nuclear localization sequence, without nuclear export signal, cytoplasmic localizing signal).

Human AID:
[sequence omitted]
(underline: nuclear localization sequence; double
underline: nuclear export signal)
Mouse AID:
MDSLLMKQKKFLYHFKNVRWAKGRHETYLCYVVKRRDSATSCSLDFGHLR
NKSGCHVELLFLRYISDWDLDPGRCYRVTWFTSWSPCYDCARHVAEFLRW
NPNLSLRIFTARLYFCEDRKAEPEGLRRLHRAGVQIGIMTFKDYFYCWNT
FVENRERTFKAWEGLHENSVRLTRQLRRILLPLYEVDDLRDAFRMLGF
(underline: nuclear localization sequence; double
underline: nuclear export signal)
Canine AID:
MDSLLMKQRKFLYHFKNVRWAKGRHETYLCYVVKRRDSATSFSLDFGHLR
NKSGCHVELLFLRYISDWDLDPGRCYRVTWFTSWSPCYDCARHVADFLRG
YPNLSLRIFAARLYFCEDRKAEPEGLRRLHRAGVQIAIMTFKDYFYCWNT
FVENREKTFKAWEGLHENSVRLSRQLRRILLPLYEVDDLRDAFRTLGL
(underline: nuclear localization sequence; double
underline: nuclear export signal)
Bovine AID:
MDSLLKKQRQFLYQFKNVRWAKGRHETYLCYVVKRRDSPTSFSLDFGHLR
NKAGCHVELLFLRYISDWDLDPGRCYRVTWFTSWSPCYDCARHVADFLRG
YPNLSLRIFTARLYFCDKERKAEPEGLRRLHRAGVQIAIMTFKDYFYCWN
TFVENHERTFKAWEGLHENSVRLSRQLRRILLPLYEVDDLRDAFRTLGL
(underline: nuclear localization sequence; double
underline: nuclear export signal)
Rat AID:
MAVGSKPKAALVGPHWERERIWCFLCSTGLGTQQTGQTSRWLRPAATQDP
VSPPRSLLMKQRKFLYHFKNVRWAKGRHETYLCYVVKRRDSATSFSLDFG
YLRNKSGCHVELLFLRYISDWDLDPGRCYRVTWFTSWSPCYDCARHVADF
LRGNPNLSLRIFTARLTGWGALPAGLMSPARPSDYFYCWNTFVENHERTF
KAWEGLHENSVRLSRRLRRILLPLYEVDDLRDAFRTLGL
(underline: nuclear localization sequence; double
underline: nuclear export signal)
clAID (Canis lupus familiaris):
MDSLLMKQRKFLYHFKNVRWAKGRHETYLCYVVKRRDSATSFSLDFGHLR
NKSGCHVELLFLRYISDWDLDPGRCYRVTWFTSWSPCYDCARHVADFLRG
YPNLSLRIFAARLYFCEDRKAEPEGLRRLHRAGVQIAIMTFKDYFYCWNT
FVENREKTFKAWEGLHENSVRLSRQLRRILLPLYEVDDLRDAFRTLGL
btAID (Bos Taurus):
MDSLLKKQRQFLYQFKNVRWAKGRHETYLCYVVKRRDSPTSFSLDFGHLR
NKAGCHVELLFLRYISDWDLDPGRCYRVTWFTSWSPCYDCARHVADFLRG
YPNLSLRIFTARLYFCDKERKAEPEGLRRLHRAGVQIAIMTFKDYFYCWN
TFVENHERTFKAWEGLHENSVRLSRQLRRILLPLYEVDDLRDAFRTLGL
mAID (Mus musculus):
[sequence omitted]
RrA3F (Rhinopithecus roxellana)
MKPQIRDHRPNPMEAMYPHIFYFHFENLEKAYGRNETWLCFTVEIIKQYL
PVPWKKGVFRNQVDPETHCHAEKCFLSWFCNNTLSPKKNYQVTWYTSWSP
CPECAGEVAEFLAEHSNVKLTIYTARLYY [symbol] WDTDYQEGLRSLSEEGASVE
IMDYEDFQYCWENFVYDDGEPFKRWKGLKYNFQSLTRRLREILQ

In the above RrA3F sequence, the Phenylalanine (F) amino acid residue at position 130, which is substituted with leucine (L), i.e., an F130L mutation, as described herein (e.g., Examples 3 and 4), is designated in bold and underline

amAPOBEC-1 (Alligator mississippiensis)
MADSSEKMRGQYISRDTFEKNYKPIDGTKEAHLLCEIKWGKYGKPWLHWC
QNQRMNIHAEDYFMNNIFKAKKHPVHCYVTWYLSWSPCADCASKIVKFLE
ERPYLKLTIYVAQLYYHTEEENRKGLRLLRSKKVIIRVMDISDYNYCWKV
FVSNQNGNEDYWPLQFDPWVKENYSRLLDIFWESKCRSPNPW
rAPOBEC-1 (Rattus norvegicus):
MSSETGPVAVDPTLRRRIEPHEFEVFFDPRELRKETCLLYEINWGGRHSI
WRHTSQNTNKHVEVNFIEKETTERYFCPNTRCSITWFLSWSPCGECSRAI
TEFLSRYPHVTLFIYIARLYHHADPRNRQGLRDLISSGVTIQIMTEQESG
YCWRNFVNYSPSNEAHWPRYPHLWVRLYVLELYCIILGLPPCLNILRRKQ
PQLTFFTIALQSCHYQRLPPHILWATGLK
maAPOBEC-1 (Mesocricetus auratus):
MSSETGPVVVDPILRRRIEPHEFDAFFDQGELRKETCLLYEIRWGGRHNI
WRHTGQNTSRHVEINFIEKFTSERYFYPSTRCSIVWFLSWSPCGECSKAI
TEFLSGHPNVTLFIYAARLYHHTDQRNRQGLRDLISRGVTIRIMTEQEYC
YCWRNEVNYPPSNEVYWPRYPNLWMRLYALELYCIHLGLPPCLKIKRRHQ
YPLTFFRLNLQSCHYQRIPPHILWATGFI
ppAPOBEC-1 (Pongo pygmaeus):
MTSEKGPSTGDPILRRRIESWEEDVEYDPRELRKETCLLYEIKWGMSRKI
WRSSGKNITNHVEVNFIKKFTSERREHSSISCSITWELSWSPCWECSQAI
REFLSQHPGVTLVIYVARLFWHMDQRNRQGLRDLVNSGVTIQIMRASEYY
HCWRNEVNYPPGDEAHWPQYPPLWMMLYALELHCIILSLPPCLKISRRWQ
NHLAFFRLHLQNCHYQTIPPHILLATGLIHPSVTWR
ppAPOBEC-1 H122A (Pongo pygmaeus)
MTSEKGPSTGDPILRRRIESWEEDVEYDPRELRKETCLLYEIKWGMSRKI
WRSSGKNITNHVEVNFIKKFTSERREHSSISCSITWELSWSPCWECSQAI
REFLSQHPGVTLVIYVARLFWAMDQRNRQGLRDLVNSGVTIQIMRASEYY
HCWRNEVNYPPGDEAHWPQYPPLWMMLYALELHCIILSLPPCLKISRRWQ
NHLAFFRLHLQNCHYQTIPPHILLATGLIHPSVTWRLK

In the above ppAPOBEC1 sequence, the amino acid residue at position 122 reflects an H122A mutation in the above, non-mutated ppAPOBEC1 sequence, as described herein (e.g., Examples 3 and 4).

ocAPOBEC1 (Oryctolagus cuniculus):
MASEKGPSNKDYTLRRRIEPWEFEVFFDPQELRKEACLLYEIKWGASSKTWRSSGKNTTNHVEVNFLE
KLTSEGRLGPSTCCSITWFLSWSPCWECSMAIREFLSQHPGVTLIIFVARLFQHMDRRNRQGLKDLVT
SGVIVRVMSVSEYCYCWENEVNYPPGKAAQWPRYPPRWMLMYALELYCIILGLPPCLKISRRHQKQLT
FESLTPQYCHYKMIPPYILLATGLLQPSVPWR
mdAPOBEC-1 (Monodelphis domestica):
MNSKTGPSVGDATLRRRIKPWEFVAFFNPQELRKETCLLYEIKWGNQNIWRHSNQNTSQHAEINFMEK
FTAERHENSSVRCSITWFLSWSPCWECSKAIRKFLDHYPNVTLAIFISRLYWHMDQQHRQGLKELVHS
GVTIQIMSYSEYHYCWRNFVDYPQGEEDYWPKYPYLWIMLYVLELHCIILGLPPCLKISGSHSNQLAL
FSLDLQDCHYQKIPYNVLVATGLVQPFVTWR
ppAPOBEC-2 (Pongo pygmaeus):
MAQKEEAAAATEAASQNGEDLENLDDPEKLKELIELPPFEIVTGERLPANFFKFQFRNVEYSSGRNKT
FLCYVVEAQGKGGQVQASRGYLEDEHAAAHAEEAFFNTILPAFDPALRYNVTWYVSSSPCAACADRII
KTLSKTKNLRLLILVGRLFMWEELEIQDALKKLKEAGCKLRIMKPQDFEYVWQNFVEQEEGESKAFQP
WEDIQENFLYYEEKLADILK
btAPOBEC-2 (Bos Taurus):
MAQKEEAAAAAEPASQNGEEVENLEDPEKLKELIELPPFEIVTGERLPAHYFKFQFRNVEYSSGRNKT
FLCYVVEAQSKGGQVQASRGYLEDEHATNHAEEAFFNSIMPTFDPALRYMVTWYVSSSPCAACADRIV
KTLNKTKNLRLLILVGRLFMWEEPEIQAALRKLKEAGCRLRIMKPQDFEYIWQNFVEQEEGESKAFEP
WEDIQENFLYYEEKLADILK
ssAPOBEC-2 (Sus scrofa)
MDPQRLRQWPGPGPASRGGYGQRPRIRNPEEWFHELSPRTFSFHFRNLRFASGRNRSYICCQVEGKNC
FFQGIFQNQVPPDPPCHAELCFLSWFQSWGLSPDEHYYVTWFISWSPCCECAAKVAQFLEENRNVSLS
LSAARLYYFWKSESREGLRRLSDLGAQVGIMSFQDFQHCWNNFVHNLGMPFQPWKKLHKNYQRLVTEL
KQILREEPATYGSPQAQGKVRIGSTAAGLRHSHSHTRSEAHLRPNHSSRQHRILNPPREARARTCVLV
DASWICYR
mAPOBEC-3-(1) (Mus musculus):
MQPQRLGPRAGMGPFCLGCSHRKCYSPIRNLISQETFKFHFKNLGYAKGRKDTFLCYEVTRKDCDSPV
SLHHGVFKNKDNIHAEICFLYWFHDKVLKVLSPREEFKITWYMSWSPCFECAEQIVRFLATHHNLSLD
IFSSRLYNVQDPETQQNLCRLVQEGAQVAAMDLYEFKKCWKKFVDNGGRRFRPWKRLLTNFRYQDSKL
QEILRPCYISVPSSSSSTLSNICLTKGLPETRFWVEGRRMDPLSEEEFYSQFYNQRVKHLCYYHRMKP
YLCYQLEQFNGQAPLKGCLLSEKGKQHAEILFLDKIRSMELSQVTITCYLTWSPCPNCAWQLAAFKRD
RPDLILHIYTSRLYFHWKRPFQKGLCSLWQSGILVDVMDLPQFTDCWTNFVNPKRPFWPWKGLEIISR
RTQRRLRRIKESWGLQDLVNDFGNLQLGPPMS
Mouse APOBEC-3-(2):
MGPFCLGCSHRKCYSPIRNLISQETFKFHFKNLGYAKGRKDTFLCYEVTRKDCDSPVSLHHGVFKNKD
NIHAEICFLYWFHDKVLKVLSPREEFKITWYMSWSPCFECAEQIVRFLATHHNLSLDIFSSRLYNVQD
PETQQNLCRLVQEGAQVAAMDLYEFKKCWKKFVDNGGRRFRPWKRLLTNFRYQDSKLQEILRPCYIPV
PSSSSSTLSNICLTKGLPETRFCVEGRRMDPLSEEEFYSQFYNQRVKHLCYYHRMKPYLCYQLEQFNG
QAPLKGCLLSEKGKQHAEILFLDKIRSMELSQVTITCYLTWSPCPNCAWQLAAFKRDRPDLILHIYTS
RLYFHWKRPFQKGLCSLWQSGILVDVMDLPQFTDCWTNFVNPKRPFWPWKGLEIISRRTQRRLRRIKE
SWGLQDLVNDFGNLQLGPPMS
(italic: nucleic acid editing domain)
Rat APOBEC-3:
MGPFCLGCSHRKCYSPIRNLISQETFKFHFKNRLRYAIDRKDTFLCYEVTRKDCDSPVSLHHGVFKNK
DNIHAEICFLYWFHDKVLKVLSPREEFKITWYMSWSPCFECAEQVLRFLATHHNLSLDIFSSRLYNIR
DPENQQNLCRLVQEGAQVAAMDLYEFKKCWKKFVDNGGRRFRPWKKLLTNFRYQDSKLQEILRPCYIP
VPSSSSSTLSNICLTKGLPETRFCVERRRVHLLSEEEFYSQFYNQRVKHLCYYHGVKPYLCYQLEQFN
GQAPLKGCLLSEKGKQHAEILFLDKIRSMELSQVIITCYLTWSPCPNCAWQLAAFKRDRPDLILHIYT
SRLYFHWKRPFQKGLCSLWQSGILVDVMDLPQFTDCWTNFVNPKRPFWPWKGLEIISRRTQRRLHRIK
ESWGLQDLVNDFGNLQLGPPMS
(italic: nucleic acid editing domain)
hAPOBEC-3A (Homo sapiens):
MEASPASGPRHLMDPHIFTSNFNNGIGRHKTYLCYEVERLDNGTSVKMDQHRGFLHNQAKNLLCGFYG
RHAELRFLDLVPSLQLDPAQIYRVTWFISWSPCFSWGCAGEVRAFLQENTHVRLRIFAARIYDYDPLY
KEALQMLRDAGAQVSIMTYDEFKHCWDTFVDHQGCPFQPWDGLDEHSQALSGRLRAILQNQGN
hAPOBEC-3F (Homo sapiens):
MKPHFRNTVERMYRDTFSYNFYNRPILSRRNTVWLCYEVKTKGPSRPRLDAKIFRGQVYSQPEHHAEM
CFLSWFCGNQLPAYKCFQITWFVSWTPCPDCVAKLAEFLAEHPNVTLTISAARLYYYWERDYRRALCR
LSQAGARVKIMDDEEFAYCWENFVYSEGQPFMPWYKFDDNYAFLHRTLKEILRNPMEAMYPHIFYFHF
KNLRKAYGRNESWLCFTMEVVKHHSPVSWKRGVFRNQVDPETHCHAERCFLSWFCDDILSPNTNYEVT
WYTSWSPCPECAGEVAEFLARHSNVNLTIFTARLYYFWDTDYQEGLRSLSQEGASVEIMGYKDFKYCW
ENFVYNDDEPFKPWKGLKYNFLFLDSKLQEILE
Rhesus macaque APOBEC-3G:
MVEPMDPRTFVSNFNNRPILSGLNTVWLCCEVKTKDPSGPPLDAKIFQGKVYSKAKYHPEMRFLRWFH
KWRQLHHDQEYKVTWYVSWSPCTRCANSVATFLAKDPKVTLTIFVARLYYFWKPDYQQALRILCQKRG
GPHATMKIMNYNEFQDCWNKFVDGRGKPFKPRNNLPKHYTLLQATLGELLRHLMDPGTFTSNFNNKPW
VSGQHETYLCYKVERLHNDTWVPLNQHRGFLRNQAPNIHGFPKGRHAELCFLDLIPFWKLDGQQYRVT
CFTSWSPCFSCAQEMAKFISNNEHVSLCIFAARIYDDQGRYQEGLRALHRDGAKIAMMNYSEFEYCWD
TFVDRQGRPFQPWDGLDEHSQALSGRLRAI
(italic: nucleic acid editing domain; underline: cytoplasmic
localization signal)
Chimpanzee APOBEC-3G:
MKPHFRNPVERMYQDTFSDNFYNRPILSHRNTVWLCYEVKTKGPSRPPLDAKIFRGQVYSKLKYHPEM
RFFHWFSKWRKLHRDQEYEVTWYISWSPCTKCTRDVATFLAEDPKVTLTIFVARLYYFWDPDYQEALR
SLCQKRDGPRATMKIMNYDEFQHCWSKFVYSQRELFEPWNNLPKYYILLHIMLGEILRHSMDPPTFTS
NFNNELWVRGRHETYLCYEVERLHNDTWVLLNQRRGFLCNQAPHKHGFLEGRHAELCFLDVIPFWKLD
LHQDYRVTCFTSWSPCFSCAQEMAKFISNNKHVSLCIFAARIYDDQGRCQEGLRTLAKAGAKISIMTY
SEFKHCWDTFVDHQGCPFQPWDGLEEHSQALSGRLRAILQNQGN
(italic: nucleic acid editing domain; underline: cytoplasmic
localization signal)
Green monkey APOBEC-3G:
MNPQIRNMVEQMEPDIFVYYFNNRPILSGRNTVWLCYEVKTKDPSGPPLDANIFQGKLYPEAKDHPEM
KFLHWFRKWRQLHRDQEYEVTWYVSWSPCTRCANSVATFLAEDPKVTLTIFVARLYYFWKPDYQQALR
ILCQERGGPHATMKIMNYNEFQHCWNEFVDGQGKPFKPRKNLPKHYTLLHATLGELLRHVMDPGTFTS
NFNNKPWVSGQRETYLCYKVERSHNDTWVLLNQHRGFLRNQAPDRHGFPKGRHAELCFLDLIPFWKLD
DQQYRVTCFTSWSPCFSCAQKMAKFISNNKHVSLCIFAARIYDDQGRCQEGLRTLHRDGAKIAVMNYS
EFEYCWDTFVDRQGRPFQPWDGLDEHSQALSGRLRAI
(italic: nucleic acid editing domain; underline: cytoplasmic
localization signal)
Human APOBEC-3G:
MKPHFRNTVERMYRDTFSYNFYNRPILSRRNTVWLCYEVKTKGPSRPPLDAKIFRGQVYSELKYHPEM
RFFHWFSKWRKLHRDQEYEVTWYISWSPCTKCTRDMATFLAEDPKVTLTIFVARLYYFWDPDYQEALR
SLCQKRDGPRATMKIMNYDEFQHCWSKFVYSQRELFEPWNNLPKYYILLHIMLGEILRHSMDPPTFTF
NFNNEPWVRGRHETYLCYEVERMHNDTWVLLNQRRGFLCNQAPHKHGFLEGRHAELCFLDVIPFWKLD
LDQDYRVTCFTSWSPCFSCAQEMAKFISKNKHVSLCIFTARIYDDQGRCQEGLRTLAEAGAKISIMTY
SEFKHCWDTFVDHQGCPFQPWDGLDEHSQDLSGRLRAILQNQEN
(italic: nucleic acid editing domain; underline: cytoplasmic
localization signal)
Human APOBEC-3F:
MKPHFRNTVERMYRDTFSYNFYNRPILSRRNTVWLCYEVKTKGPSRPRLDAKIFRGQVYSQPEHHAEM
CFLSWFCGNQLPAYKCFQITWFVSWTPCPDCVAKLAEFLAEHPNVTLTISAARLYYYWERDYRRALCR
LSQAGARVKIMDDEEFAYCWENFVYSEGQPFMPWYKFDDNYAFLHRTLKEILRNPMEAMYPHIFYFHF
KNLRKAYGRNESWLCFTMEVVKHHSPVSWKRGVFRNQVDPETHCHAERCFLSWFCDDILSPNTNYEVT
WYTSWSPCPECAGEVAEFLARHSNVNLTIFTARLYYFWDTDYQEGLRSLSQEGASVEIMGYKDFKYCW
ENFVYNDDEPFKPWKGLKYNFLFLDSKLQEILE
(italic: nucleic acid editing domain)
Human APOBEC-3B:
MNPQIRNPMERMYRDTFYDNFENEPILYGRSYTWLCYEVKIKRGRSNLLWDTGVFRGQVYFKPQYHAE
MCFLSWFCGNQLPAYKCFQITWFVSWTPCPDCVAKLAEFLSEHPNVTLTISAARLYYYWERDYRRALC
RLSQAGARVTIMDYEEFAYCWENFVYNEGQQFMPWYKFDENYAFLHRTLKEILRYLMDPDTFTFNFNN
DPLVLRRRQTYLCYEVERLDNGTWVLMDQHMGFLCNEAKNLLCGFYGRHAELRFLDLVPSLQLDPAQI
YRVTWFISWSPCFSWGCAGEVRAFLQENTHVRLRIFAARIYDYDPLYKEALQMLRDAGAQVSIMTYDE
FEYCWDTFVYRQGCPFQPWDGLEEHSQALSGRLRAILQNQGN
(italic: nucleic acid editing domain)
Rat APOBEC-3B:
MQPQGLGPNAGMGPVCLGCSHRRPYSPIRNPLKKLYQQTFYFHFKNVRYAWGRKNNFLCYEVNGMDCA
LPVPLRQGVFRKQGHIHAELCFIYWFHDKVLRVLSPMEEFKVTWYMSWSPCSKCAEQVARFLAAHRNL
SLAIFSSRLYYYLRNPNYQQKLCRLIQEGVHVAAMDLPEFKKCWNKFVDNDGQPFRPWMRLRINFSFY
DCKLQEIFSRMNLLREDVFYLQFNNSHRVKPVQNRYYRRKSYLCYQLERANGQEPLKGYLLYKKGEQH
VEILFLEKMRSMELSQVRITCYLTWSPCPNCARQLAAFKKDHPDLILRIYTSRLYFWRKKFQKGLCTL
WRSGIHVDVMDLPQFADCWTNFVNPQRPFRPWNELEKNSWRIQRRLRRIKESWGL
Bovine APOBEC-3B:
DGWEVAFRSGTVLKAGVLGVSMTEGWAGSGHPGQGACVWTPGTRNTMNLLREVLFKQQFGNQPRVPAP
YYRRKTYLCYQLKQRNDLTLDRGCFRNKKQRHAERFIDKINSLDLNPSQSYKIICYITWSPCPNCANE
LVNFITRNNHLKLEIFASRLYFHWIKSFKMGLQDLQNAGISVAVMTHTEFEDCWEQFVDNQSRPFQPW
DKLEQYSASIRRRLQRILTAPI
Chimpanzee APOBEC-3B:
MNPQIRNPMEWMYQRTFYYNFENEPILYGRSYTWLCYEVKIRRGHSNLLWDTGVFRGQMYSQPEHHAE
MCFLSWFCGNQLSAYKCFQITWFVSWTPCPDCVAKLAKFLAEHPNVTLTISAARLYYYWERDYRRALC
RLSQAGARVKIMDDEEFAYCWENFVYNEGQPFMPWYKFDDNYAFLHRTLKEIIRHLMDPDTFTFNFNN
DPLVLRRHQTYLCYEVERLDNGTWVLMDQHMGFLCNEAKNLLCGFYGRHAELRFLDLVPSLQLDPAQI
YRVTWFISWSPCFSWGCAGQVRAFLQENTHVRLRIFAARIYDYDPLYKEALQMLRDAGAQVSIMTYDE
FEYCWDTFVYRQGCPFQPWDGLEEHSQALSGRLRAILQVRASSLCMVPHRPPPPPQSPGPCLPLCSEP
PLGSLLPTGRPAPSLPFLLTASFSFPPPASLPPLPSLSLSPGHLPVPSFHSLTSCSIQPPCSSRIRET
EGWASVSKEGRDLG
Human APOBEC-3C:
MNPQIRNPMKAMYPGTFYFQFKNLWEANDRNETWLCFTVEGIKRRSVVSWKTGVFRNQVDSETHCHAE
RCFLSWFCDDILSPNTKYQVTWYTSWSPCPDCAGEVAEFLARHSNVNLTIFTARLYYFQYPCYQEGLR
SLSQEGVAVEIMDYEDFKYCWENFVYNDNEPFKPWKGLKTNFRLLKRRLRESLQ
(italic: nucleic acid editing domain)
Gorilla APOBEC-3C
MNPQIRNPMKAMYPGTFYFQFKNLWEANDRNETWLCFTVEGIKRRSVVSWKTGVFRNQVDSETHCHAE
RCFLSWECDDILSPNTNYQVTWYTSWSPCPECAGEVAEFLARHSNVNLTIFTARLYYFQDTDYQEGLR
SLSQEGVAVKIMDYKDFKYCWENFVYNDDEPFKPWKGLKYNFRFLKRRLQEILE
(italic: nucleic acid editing domain)
Human APOBEC-3A:
MEASPASGPRHLMDPHIFTSNFNNGIGRHKTYLCYEVERLDNGTSVKMDQHRGFLHNQAKNLLCGFYG
RHAELRFLDLVPSLQLDPAQIYRVTWFISWSPCFSWGCAGEVRAFLQENTHVRLRIFAARIYDYDPLY
KEALQMLRDAGAQVSIMTYDEFKHCWDTFVDHQGCPFQPWDGLDEHSQALSGRLRAILQNQGN
(italic: nucleic acid editing domain)
Rhesus macaque APOBEC-3A:
MDGSPASRPRHLMDPNTFTFNFNNDLSVRGRHQTYLCYEVERLDNGTWVPMDERRGFLCNKAKNVPCG
DYGCHVELRFLCEVPSWQLDPAQTYRVTWFISWSPCFRRGCAGQVRVFLQENKHVRLRIFAARIYDYD
PLYQEALRTLRDAGAQVSIMTYEEFKHCWDTFVDRQGRPFQPWDGLDEHSQALSGRLRAILQNQGN
(italic: nucleic acid editing domain)
Bovine APOBEC-3A:
MDEYTFTENFNNQGWPSKTYLCYEMERLDGDATIPLDEYKGFVRNKGLDQPEKPCHAELYFLGKIHSW
NLDRNQHYRLTCFISWSPCYDCAQKLTTFLKENHHISLHILASRIYTHNRFGCHQSGLCELQAAGARI
TIMTFEDFKHCWETFVDHKGKPFQPWEGLNVKSQALCTELQAILKTQQN
(italic: nucleic acid editing domain)
Human APOBEC-3H:
MALLTAETFRLQFNNKRRLRRPYYPRKALLCYQLTPQNGSTPTRGYFENKKKCHAEICFINEIKSMGL
DETQCYQVTCYLTWSPCSSCAWELVDFIKAHDHLNLGIFASRLYYHWCKPQQKGLRLLCGSQVPVEVM
GFPKFADCWENFVDHEKPLSFNPYKMLEELDKNSRAIKRRLERIKIPGVRAQGRYMDILCDAEV
(italic: nucleic acid editing domain)
Rhesus macaque APOBEC-3H:
MALLTAKTFSLQFNNKRRVNKPYYPRKALLCYQLTPQNGSTPTRGHLKNKKKDHAEIRFINKIKSMGL
DETQCYQVTCYLTWSPCPSCAGELVDFIKAHRHLNLRIFASRLYYHWRPNYQEGLLLLCGSQVPVEVM
GLPEFTDCWENFVDHKEPPSFNPSEKLEELDKNSQAIKRRLERIKSRSVDVLENGLRSLQLGPVTPSS
SIRNSR
Human APOBEC-3D:
MNPQIRNPMERMYRDTFYDNFENEPILYGRSYTWLCYEVKIKRGRSNLLWDTGVFRGPVLPKRQSNHR
QEVYFRFENHAEMCFLSWFCGNRLPANRRFQITWFVSWNPCLPCVVKVTKFLAEHPNVTLTISAARLY
YYRDRDWRWVLLRLHKAGARVKIMDYEDFAYCWENFVCNEGQPFMPWYKFDDNYASLHRTLKEILRNP
MEAMYPHIFYFHFKNLLKACGRNESWLCFTMEVTKHHSAVFRKRGVFRNQVDPETHCHAERCFLSWFC
DDILSPNTNYEVTWYTSWSPCPECAGEVAEFLARHSNVNLTIFTARLCYFWDTDYQEGLCSLSQEGAS
VKIMGYKDFVSCWKNFVYSDDEPFKPWKGLQTNFRLLKRRLREILQ
(italic: nucleic acid editing domain)
Human APOBEC-1:
MTSEKGPSTGDPTLRRRIEPWEFDVFYDPRELRKEACLLYEIKWGMSRKIWRSSGKNTTNHVEVNFIK
KFTSERDFHPSMSCSITWFLSWSPCWECSQAIREFLSRHPGVTLVIYVARLFWHMDQQNRQGLRDLVN
SGVTIQIMRASEYYHCWRNFVNYPPGDEAHWPQYPPLWMMLYALELHCIILSLPPCLKISRRWQNHLT
FFRLHLQNCHYQTIPPHILLATGLIHPSVAWR
Mouse APOBEC-1:
MSSETGPVAVDPTLRRRIEPHEFEVFFDPRELRKETCLLYEINWGGRHSVWRHTSQNTSNHVEVNFLE
KFTTERYFRPNTRCSITWFLSWSPCGECSRAITEFLSRHPYVTLFIYIARLYHHTDQRNRQGLRDLIS
SGVTIQIMTEQEYCYCWRNFVNYPPSNEAYWPRYPHLWVKLYVLELYCIILGLPPCLKILRRKQPQLT
FFTITLQTCHYQRIPPHLLWATGLK
Rat APOBEC-1:
[sequence omitted]
Human APOBEC-2:
MAQKEEAAVATEAASQNGEDLENLDDPEKLKELIELPPFEIVTGERLPANFFKFQFRNVEYSSGRNKT
FLCYVVEAQGKGGQVQASRGYLEDEHAAAHAEEAFFNTILPAFDPALRYNVTWYVSSSPCAACADRII
KTLSKTKNLRLLILVGRLFMWEEPEIQAALKKLKEAGCKLRIMKPQDFEYVWQNFVEQEEGESKAFQP
WEDIQENFLYYEEKLADILK
Mouse APOBEC-2:
MAQKEEAAEAAAPASQNGDDLENLEDPEKLKELIDLPPFEIVTGVRLPVNFFKFQFRNVEYSSGRNKT
FLCYVVEVQSKGGQAQATQGYLEDEHAGAHAEEAFFNTILPAFDPALKYNVTWYVSSSPCAACADRIL
KTLSKTKNLRLLILVSRLFMWEEPEVQAALKKLKEAGCKLRIMKPQDFEYIWQNFVEQEEGESKAFEP
WEDIQENFLYYEEKLADILK
Rat APOBEC-2:
MAQKEEAAEAAAPASQNGDDLENLEDPEKLKELIDLPPFEIVTGVRLPVNFFKFQFRNVEYSSGRNKT
FLCYVVEAQSKGGQVQATQGYLEDEHAGAHAEEAFFNTILPAFDPALKYNVTWYVSSSPCAACADRIL
KTLSKTKNLRLLILVSRLFMWEEPEVQAALKKLKEAGCKLRIMKPQDFEYLWQNFVEQEEGESKAFEP
WEDIQENFLYYEEKLADILK
Bovine APOBEC-2:
MAQKEEAAAAAEPASQNGEEVENLEDPEKLKELIELPPFEIVTGERLPAHYFKFQFRNVEYSSGRNKT
FLCYVVEAQSKGGQVQASRGYLEDEHATNHAEEAFFNSIMPTFDPALRYMVTWYVSSSPCAACADRIV
KTLNKTKNLRLLILVGRLFMWEEPEIQAALRKLKEAGCRLRIMKPQDFEYIWQNFVEQEEGESKAFEP
WEDIQENFLYYEEKLADILK
Petromyzon marinus CDA1 (pmCDA1):
MTDAEYVRIHEKLDIYTFKKQFFNNKKSVSHRCYVLFELKRRGERRACFWGYAVNKPQSGTERGIHAE
IFSIRKVEEYLRDNPGQFTINWYSSWSPCADCAEKILEWYNQELRGNGHTLKIWACKLYYEKNARNQI
GLWNLRDNGVGLNVMVSEHYQCCRKIFIQSSHNQ
LNENRWLEKTLKRAEKRRSELSFMIQVKILHTTKSPAV
Human APOBEC3G D316R D317R:
MKPHFRNTVERMYRDTFSYNFYNRPILSRRNTVWLCYEVKTKGPSRPPLDAKIFRGQVYSELKYHPEM
RFFHWFSKWRKLHRDQEYEVTWYISWSPCTKCTRDMATFLAEDPKVTLTIFVARLYYFWDPDYQEALR
SLCQKRDGPRATMKFNYDEFQHCWSKFVYSQRELFEPWNNLPKYYILLHFMLGEILRHSMDPPTFTFN
FNNEPWVRGRHETYLCYEVERMHNDTWVLLNQRRGFLCNQAPHKHGFLEGRHAELCFLDVIPFWKLDL
DQDYRVTCFTSWSPCFSCAQEMAKFISKKHVSLCIFTARIYRRQGRCQEGLRTLAEAGAKISFTYSEF
KHCWDTFVDHQGCPFQPWDGLDEHSQDLSGRLRAILQNQEN
Human APOBEC3G chain A:
MDPPTFTFNFNNEPWWGRHETYLCYEVERMHNDTWVLLNQRRGFLCNQAPHKHGFLEGRHAELCFLDV
IPFWKLDLDQDYRVTCFTSWSPCFSCAQEMAKFISKNKHVSLCIFTARIYDDQGRCQEGLRTLAEAGA
KISFTYSEFKHCWDTFVDHQGCPFQPWDGLDEHSQDLSGRLRAILQ
Human APOBEC3G chain A D120R D121R:
MDPPTFTFNFNNEPWVRGRHETYLCYEVERMHNDTWVLLNQRRGFLCNQAPHKHGFLEGRHAELCFLD
VIPFWKLDLDQDYRVTCFTSWSPCFSCAQEMAKFISKNKHVSLCIFTARIYRRQGRCQEGLRTLAEAG
AKISFMTYSEFKHCWDTFVDHQGCPFQPWDGLDEHSQDLSGRLRAILQ
hAPOBEC-4 (Homo sapiens):
MEPIYEEYLANHGTIVKPYYWLSFSLDCSNCPYHIRTGEEARVSLTEFCQIFGFPYGTTFPQTKHLTF
YELKTSSGSLVQKGHASSCTGNYIHPESMLFEMNGYLDSAIYNNDSIRHIILYSNNSPCNEANHCCIS
KMYNFLITYPGITLSIYFSQLYHTEMDFPASAWNREALRSLASLWPRVVLSPISGGIWHSVLHSFISG
VSGSHVFQPILTGRALADRHNAYEINAITGVKPYFTDVLLQTKRNPNTKAQEALESYPLNNAFPGQFF
QMPSGQLQPNLPPDLRAPVVFVLVPLRDLPPMHMGQNPNKPRNIVRHLNMPQMSFQETKDLGRLPTGR
SVEIVEITEQFASSKEADEKKKKKGKK
mAPOBEC-4 (Mus musculus):
MDSLLMKQKKFLYHFKNVRWAKGRHETYLCYVVKRRDSATSCSLDFGHLRNKSGCHVELLFLRYISDW
DLDPGRCYRVTWFTSWSPCYDCARHVAEFLRWNPNLSLRIFTARLYFCEDRKAEPEGLRRLHRAGVQI
GIMTFKDYFYCWNTFVENRERTFKAWEGLHENSVRLTRQLRRILLPLYEVDDLRDAFRMLGF
rAPOBEC-4 (Rattus norvegicus):
MEPLYEEYLTHSGTIVKPYYWLSVSLNCTNCPYHIRTGEEARVPYTEFHQTFGFPWSTYPQTKHLTFY
ELRSSSGNLIQKGLASNCTGSHTHPESMLFERDGYLDSLIFHDSNIRHIILYSNNSPCDEANHCCISK
MYNFLMNYPEVTLSVFFSQLYHTENQFPTSAWNREALRGLASLWPQVTLSAISGGIWQSILETFVSGI
SEGLTAVRPFTAGRTLTDRYNAYEINCITEVKPYFTDALHSWQKENQDQKVWAASENQPLHNTTPAQW
QPDMSQDCRTPAVFMLVPYRDLPPIHVNPSPQKPRTVVRHLNTLQLSASKVKALRKSPSGRPVKKEEA
RKGSTRSQEANETNKSKWKKQTLFIKSNICHLLEREQKKIGILSSWSV
mfAPOBEC-4 (Macaca fascicularis):
MEPTYEEYLANHGTIVKPYYWLSFSLDCSNCPYHIRTGEEARVSLTEFCQIFGFPYGTTYPQTKHLTF
YELKTSSGSLVQKGHASSCTGNYIHPESMLFEMNGYLDSAIYNNDSIRHIILYCNNSPCNEANHCCIS
KVYNFLITYPGITLSIYFSQLYHTEMDFPASAWNREALRSLASLWPRVVLSPISGGIWHSVLHSFVSG
VSGSHVFQPILTGRALTDRYNAYEINAITGVKPFFTDVLLHTKRNPNTKAQMALESYPLNNAFPGQSF
QMTSGIPPDLRAPVVFVLLPLRDLPPMHMGQDPNKPRNIIRHLNMPQMSFQETKDLERLPTRRSVETV
EITERFASSKQAEEKTKKKKGKK
pmCDA-1 (Petromyzon marinus):
MAGYECVRVSEKLDFDTFEFQFENLHYATERHRTYVIFDVKPQSAGGRSRRLWGYIINNPNVCHAELI
LMSMIDRHLESNPGVYAMTWYMSWSPCANCSSKLNPWLKNLLEEQGHTLTMHFSRIYDRDREGDHRGL
RGLKHVSNSFRMGVVGRAEVKECLAEYVEASRRTLTWLDTTESMAAKMRRKLFCILVRCAGMRESGIP
LHLFTLQTPLLSGRVVWWRV
pmCDA-2 (Petromyzon marinus):
MELREVVDCALASCVRHEPLSRVAFLRCFAAPSQKPRGTVILFYVEGAGRGVTGGHAVNYNKQGTSIH
AEVLLLSAVRAALLRRRRCEDGEEATRGCTLHCYSTYSPCRDCVEYIQEFGASTGVRVVIHCCRLYEL
DVNRRRSEAEGVLRSLSRLGRDFRLMGPRDAIALLLGGRLANTADGESGASGNAWVTETNVVEPLVDM
TGFGDEDLHAQVQRNKQIREAYANYASAVSLMLGELHVDPDKFPFLAEFLAQTSVEPSGTPRETRGRP
RGASSRGPEIGRQRPADFERALGAYGLFLHPRIVSREADREEIKRDLIVVMRKHNYQGP
pmCDA-5 (Petromyzon marinus):
MAGDENVRVSEKLDFDTFEFQFENLHYATERHRTYVIFDVKPQSAGGRSRRLWGYIINNPNVCHAELI
LMSMIDRHLESNPGVYAMTWYMSWSPCANCSSKLNPWLKNLLEEQGHTLMMHFSRIYDRDREGDHRGL
RGLKHVSNSFRMGVVGRAEVKECLAEYVEASRRTLTWLDTTESMAAKMRRKLFCILVRCAGMRESGMP
LHLFT
yCD (Saccharomyces cerevisiae):
MVTGGMASKWDQKGMDIAYEEAALGYKEGGVPIGGCLINNKDGSVLGRGHNMRFQKGSATLHGEISTL
ENCGRLEGKVYKDTTLYTTLSPCDMCTGAIIMYGIPRCVVGENVNFKSKGEKYLQTRGHEVVVVDDER
CKKIMKQFIDERPQDWFEDIGE
rAPOBEC-1 (delta 177-186):
MSSETGPVAVDPTLRRRIEPHEFEVFFDPRELRKETCLLYEINWGGRHSIWRHTSQNTNKHVEVNFIE
KFTTERYFCPNTRCSITWFLSWSPCGECSRAITEFLSRYPHVTLFIYIARLYHHADPRNRQGLRDLIS
SGVTIQIMTEQESGYCWRNFVNYSPSNEAHWPRYPHLWVRGLPPCLNILRRKQPQLTFFTIALQSCHY
QRLPPHILWATGLK
rAPOBEC-1 (delta 202-213):
MSSETGPVAVDPTLRRRIEPHEFEVFFDPRELRKETCLLYEINWGGRHSIWRHTSQNTNKHVEVNFIE
KFTTERYFCPNTRCSITWFLSWSPCGECSRAITEFLSRYPHVTLFIYIARLYHHADPRNRQGLRDLIS
SGVTIQIMTEQESGYCWRNFVNYSPSNEAHWPRYPHLWVRLYVLELYCIILGLPPCLNILRRKQPQHY
QRLPPHILWATGLK
Mouse APOBEC-3:
MGPFCLGCSHRKCYSPIRNLISQETFKFHFKNLGYAKGRKDTFLCYEVTRKDCDSPVSLHHG
VFKNKDNIHAEICFLYWFHDKVLKVLSPREEFKITWYMSWSPCFECAEQIVRFLATHHNLSL
DIFSSRLYNVQDPETQQNLCRLVQEGAQVAAMDLYEFKKCWKKFVDNGGRRFRPWKRLLTNF
RYQDSKLQEILRPCYIPVPSSSSSTLSNICLIKGLPETRFCVEGRRMDPLSEEEFYSQFYNQ
RVKHLCYYHRMKPYLCYQLEQFNGQAPLKGCLLSEKGKQHAEILFLDKIRSMELSQVTITCY
LTWSPCPNCAWQLAAFKRDRPDLILHIYTSRLYFHWKRPFQKGLCSLWQSGILVDVMDLPQF
TDCWTNFVNPKRPFWPWKGLEIISRRTQRRLRRIKESWGLQDLVNDFGNLQLGPPMS
(italic: nucleic acid editing domain)

[0565] Some aspects of the present disclosure are based on the recognition that modulating the deaminase domain catalytic activity of any of the fusion proteins described herein, for example by making point mutations in the deaminase domain, affect the processivity of the fusion proteins (e.g., base editors). For example, mutations that reduce, but do not eliminate, the catalytic activity of a deaminase domain within a base editing fusion protein can make it less likely that the deaminase domain will catalyze the deamination of a residue adjacent to a target residue, thereby narrowing the deamination window. The ability to narrow the deamination window can prevent unwanted deamination of residues adjacent to specific target residues, which can decrease or prevent off-target effects.

[0566] For example, in some embodiments, an APOBEC deaminase incorporated into a base editor can comprise one or more mutations selected from the group consisting of H121X, H122X, R126X, R126X, R118X, W90X, W90X, and R132X of rAPOBEC1, or one or more corresponding mutations in another APOBEC deaminase, wherein X is any amino acid. In some embodiments, an APOBEC deaminase incorporated into a base editor can comprise one or more mutations selected from the group consisting of H121R, H122R, R126A, R126E, R118A, W90A, W90Y, and R132E of rAPOBEC1, or one or more corresponding mutations in another APOBEC deaminase.

[0567] In some embodiments, an APOBEC deaminase incorporated into a base editor can comprise one or more mutations selected from the group consisting of D316X, D317X, R320X, R320X, R313X, W285X, W285X, R326X of hAPOBEC3G, or one or more corresponding mutations in another APOBEC deaminase, wherein X is any amino acid. In some embodiments, any of the fusion proteins provided herein comprise an APOBEC deaminase comprising one or more mutations selected from the group consisting of D316R, D317R, R320A, R320E, R313A, W285A, W285Y, R326E of hAPOBEC3G, or one or more corresponding mutations in another APOBEC deaminase.

[0568] In some embodiments, an APOBEC deaminase incorporated into a base editor can comprise a H121R and a H122R mutation of rAPOBEC1, or one or more corresponding mutations in another APOBEC deaminase. In some embodiments an APOBEC deaminase incorporated into a base editor can comprise an APOBEC deaminase comprising a R126A mutation of rAPOBEC1, or one or more corresponding mutations in another APOBEC deaminase. In some embodiments, an APOBEC deaminase incorporated into a base editor can comprise an APOBEC deaminase comprising a R126E mutation of rAPOBEC1, or one or more corresponding mutations in another APOBEC deaminase. In some embodiments, an APOBEC deaminase incorporated into a base editor can comprise an APOBEC deaminase comprising a R118A mutation of rAPOBEC1, or one or more corresponding mutations in another APOBEC deaminase. In some embodiments, an APOBEC deaminase incorporated into a base editor can comprise an APOBEC deaminase comprising a W90A mutation of rAPOBEC1, or one or more corresponding mutations in another APOBEC deaminase. In some embodiments, an APOBEC deaminase incorporated into a base editor can comprise an APOBEC deaminase comprising a W90Y mutation of rAPOBEC1, or one or more corresponding mutations in another APOBEC deaminase. In some embodiments, an APOBEC deaminase incorporated into a base editor can comprise an APOBEC deaminase comprising a R132E mutation of rAPOBEC1, or one or more corresponding mutations in another APOBEC deaminase. In some embodiments an APOBEC deaminase incorporated into a base editor can comprise an APOBEC deaminase comprising a W90Y and a R126E mutation of rAPOBEC1, or one or more corresponding mutations in another APOBEC deaminase. In some embodiments, an APOBEC deaminase incorporated into a base editor can comprise an APOBEC deaminase comprising a R126E and a R132E mutation of rAPOBEC1, or one or more corresponding mutations in another APOBEC deaminase. In some embodiments, an APOBEC deaminase incorporated into a base editor can comprise an APOBEC deaminase comprising a W90Y and a R132E mutation of rAPOBEC1, or one or more corresponding mutations in another APOBEC deaminase. In some embodiments, an APOBEC deaminase incorporated into a base editor can comprise an APOBEC deaminase comprising a W90Y, R126E, and R132E mutation of rAPOBEC1, or one or more corresponding mutations in another APOBEC deaminase.

[0569] In some embodiments, an APOBEC deaminase incorporated into a base editor can comprise an APOBEC deaminase comprising a D316R and a D317R mutation of hAPOBEC3G, or one or more corresponding mutations in another APOBEC deaminase. In some embodiments, any of the fusion proteins provided herein comprise an APOBEC deaminase comprising a R320A mutation of hAPOBEC3G, or one or more corresponding mutations in another APOBEC deaminase. In some embodiments, an APOBEC deaminase incorporated into a base editor can comprise an APOBEC deaminase comprising a R320E mutation of hAPOBEC3G, or one or more corresponding mutations in another APOBEC deaminase. In some embodiments, an APOBEC deaminase incorporated into a base editor can comprise an APOBEC deaminase comprising a R313A mutation of hAPOBEC3G, or one or more corresponding mutations in another APOBEC deaminase. In some embodiments, an APOBEC deaminase incorporated into a base editor can comprise an APOBEC deaminase comprising a W285A mutation of hAPOBEC3G, or one or more corresponding mutations in another APOBEC deaminase. In some embodiments, an APOBEC deaminase incorporated into a base editor can comprise an APOBEC deaminase comprising a W285Y mutation of hAPOBEC3G, or one or more corresponding mutations in another APOBEC deaminase. In some embodiments, an APOBEC deaminase incorporated into a base editor can comprise an APOBEC deaminase comprising a R326E mutation of hAPOBEC3G, or one or more corresponding mutations in another APOBEC deaminase. In some embodiments, an APOBEC deaminase incorporated into a base editor can comprise an APOBEC deaminase comprising a W285Y and a R320E mutation of hAPOBEC3G, or one or more corresponding mutations in another APOBEC deaminase. In some embodiments, an APOBEC deaminase incorporated into a base editor can comprise an APOBEC deaminase comprising a R320E and a R326E mutation of hAPOBEC3G, or one or more corresponding mutations in another APOBEC deaminase. In some embodiments, an APOBEC deaminase incorporated into a base editor can comprise an APOBEC deaminase comprising a W285Y and a R326E mutation of hAPOBEC3G, or one or more corresponding mutations in another APOBEC deaminase. In some embodiments, an APOBEC deaminase incorporated into a base editor can comprise an APOBEC deaminase comprising a W285Y, R320E, and R326E mutation of hAPOBEC3G, or one or more corresponding mutations in another APOBEC deaminase.

[0570] A number of modified cytidine deaminases are commercially available, including, but not limited to, SaBE3, SaKKH-BE3, VQR-BE3, EQR-BE3, VRER-BE3, YE1-BE3, EE-BE3, YE2-BE3, and YEE-BE3, which are available from Addgene (plasmids 85169, 85170, 85171, 85172, 85173, 85174, 85175, 85176, 85177). In some embodiments, a deaminase incorporated into a base editor comprises all or a portion of an APOBEC1 deaminase.

[0571] Details of C to T nucleobase editing proteins are described in International PCT Application No. PCT/US2016/058344 (WO2017/070632) and Komor, A. C., et al., “Programmable editing of a target base in genomic DNA without double-stranded DNA cleavage” Nature 533, 420-424 (2016), the entire contents of which are hereby incorporated by reference.

[0572] The fusion proteins provided herein comprise a cytidine deaminase. In some embodiments, the cytidine deaminases provided herein are capable of deaminating cytosine or 5-methylcytosine to uracil or thymine. In some embodiments, the cytidine deaminases provided herein are capable of deaminating cytosine in DNA. The cytidine deaminase may be derived from any suitable organism. In some embodiments, the cytidine deaminase is a naturally-occurring cytidine deaminase that includes one or more mutations corresponding to any of the mutations provided herein. In some embodiments, the cytidine deaminase has specificity for 5′-NGC-3′ PAM and may include mutations as described in Examples 4 and 5 herein. In some embodiments, base editors comprising the cytidine deaminase having specificity for 5′-NGC-3′ PAM as described are provided. One of skill in the art will be able to identify the corresponding residue in any homologous protein, e.g., by sequence alignment and determination of homologous residues. Accordingly, one of skill in the art would be able to generate mutations in any naturally-occurring cytidine deaminase that corresponds to any of the mutations described herein. In some embodiments, the cytidine deaminase is from a prokaryote. In some embodiments, the cytidine deaminase is from a bacterium. In some embodiments, the cytidine deaminase is from a mammal (e.g., human).

[0573] In some embodiments, the cytidine deaminase comprises an amino acid sequence that is at least 60%, at least 65%, at least 70%, at least 75%, at least 80%, at least 85%, at least 90%, at least 95%, at least 96%, at least 97%, at least 98%, at least 99%, or at least 99.5% identical to any one of the cytidine deaminase amino acid sequences set forth herein. It should be appreciated that cytidine deaminases provided herein may include one or more mutations (e.g., any of the mutations provided herein). The disclosure provides any deaminase domains with a certain percent identity plus any of the mutations or combinations thereof described herein. In some embodiments, the cytidine deaminase comprises an amino acid sequence that has 1, 2, 3, 4, 5, 6, 7, 8, 9, 10, 11, 12, 13, 14, 15, 16, 17, 18, 19, 20, 21, 22, 23, 24, 25, 26, 27, 28, 29, 30, 31, 32, 33, 34, 35, 36, 37, 38, 39, 40, 41, 42, 43, 44, 45, 46, 47, 48, 49, 50, or more mutations compared to a reference sequence, or any of the cytidine deaminases provided herein. In some embodiments, the cytidine deaminase comprises an amino acid sequence that has at least 5, at least 10, at least 15, at least 20, at least 25, at least 30, at least 35, at least 40, at least 45, at least 50, at least 60, at least 70, at least 80, at least 90, at least 100, at least 110, at least 120, at least 130, at least 140, at least 150, at least 160, or at least 170 identical contiguous amino acid residues as compared to any one of the amino acid sequences known in the art or described herein.

[0574] A fusion protein of the invention comprises two or more nucleic acid editing domains. In some embodiments, the nucleic acid editing domain can catalyze a C to U base change. In some embodiments, the nucleic acid editing domain is a deaminase domain. In some embodiments, the deaminase is a cytidine deaminase or an adenosine deaminase. In some embodiments, the deaminase is an apolipoprotein B mRNA-editing complex (APOBEC) family deaminase. In some embodiments, the deaminase is an APOBEC1 deaminase. In some embodiments, the deaminase is an APOBEC2 deaminase. In some embodiments, the deaminase is an APOBEC3 deaminase. In some embodiments, the deaminase is an APOBEC3 A deaminase. In some embodiments, the deaminase is an APOBEC3B deaminase. In some embodiments, the deaminase is an APOBEC3C deaminase. In some embodiments, the deaminase is an APOBEC3D deaminase. In some embodiments, the deaminase is an APOBEC3E deaminase. In some embodiments, the deaminase is an APOBEC3F deaminase. In some embodiments, the deaminase is an APOBEC3G deaminase. In some embodiments, the deaminase is an APOBEC3H deaminase. In some embodiments, the deaminase is an APOBEC4 deaminase. In some embodiments, the deaminase is an activation-induced deaminase (AID). In some embodiments, the deaminase is a vertebrate deaminase. In some embodiments, the deaminase is an invertebrate deaminase. In some embodiments, the deaminase is a human, chimpanzee, gorilla, monkey, cow, dog, rat, or mouse deaminase. In some embodiments, the deaminase is a human deaminase. In some embodiments, the deaminase is a rat deaminase, e.g., rAPOBEC1. In some embodiments, the deaminase is a Petromyzon marinus cytidine deaminase 1 (pmCDA1). In some embodiments, the deaminase is a human APOBEC3G. In some embodiments, the deaminase is a fragment of the human APOBEC3G. In some embodiments, the deaminase is a human APOBEC3G variant comprising a D316R D317R mutation. In some embodiments, the deaminase is a fragment of the human APOBEC3G and comprises mutations corresponding to the D316R D317R mutations. In some embodiments, the nucleic acid editing domain is at least 80%, at least 85%, at least 90%, at least 92%, at least 95%, at least 96%, at least 97%, at least 98%, at least 99%), or at least 99.5% identical to the deaminase domain of any deaminase described herein.

[0575] In certain embodiments, the fusion proteins provided herein comprise one or more features that improve the base editing activity of the fusion proteins. For example, any of the fusion proteins provided herein may comprise a Cas9 domain that has reduced nuclease activity. In some embodiments, any of the fusion proteins provided herein may have a Cas9 domain that does not have nuclease activity (dCas9), or a Cas9 domain that cuts one strand of a duplexed DNA molecule, referred to as a Cas9 nickase (nCas9).

Cas9 Complexes with Guide RNAs

[0576] Some aspects of this disclosure provide complexes comprising any of the fusion proteins provided herein, and a guide RNA bound to a Cas9 domain (e.g., a dCas9, a nuclease active Cas9, or a Cas9 nickase) of fusion protein. In some embodiments, the guide nucleic acid (e.g., guide RNA) is from 15-100 nucleotides long and comprises a sequence of at least 10 contiguous nucleotides that is complementary to a target sequence. In some embodiments, the guide RNA is 15, 16, 17, 18, 19, 20, 21, 22, 23, 24, 25, 26, 27, 28, 29, 30, 31, 32, 33, 34, 35, 36, 37, 38, 39, 40, 41, 42, 43, 44, 45, 46, 47, 48, 49, or 50 nucleotides long. In some embodiments, the guide RNA comprises a sequence of 15, 16, 17, 18, 19, 20, 21, 22, 23, 24, 25, 26, 27, 28, 29, 30, 31, 32, 33, 34, 35, 36, 37, 38, 39, or 40 contiguous nucleotides that is complementary to a target sequence. In some embodiments, the target sequence is a DNA sequence. In some embodiments, the target sequence is a sequence in the genome of a bacteria, yeast, fungi, insect, plant, or animal. In some embodiments, the target sequence is a sequence in the genome of a human. In some embodiments, the 3′ end of the target sequence is immediately adjacent to a canonical PAM sequence (NGG). In some embodiments, the 3′ end of the target sequence is immediately adjacent to a non-canonical PAM sequence (e.g., a sequence listed in Table 1 or 5′-NAA-3′). In some embodiments, the guide nucleic acid (e.g., guide RNA) is complementary to a sequence in a gene of interest (e.g., a gene associated with a disease or disorder).

[0577] Some aspects of this disclosure provide methods of using the fusion proteins, or complexes provided herein. For example, some aspects of this disclosure provide methods comprising contacting a DNA molecule with any of the fusion proteins provided herein, and with at least one guide RNA, wherein the guide RNA is about 15-100 nucleotides long and comprises a sequence of at least 10 contiguous nucleotides that is complementary to a target sequence. In some embodiments, the 3′ end of the target sequence is immediately adjacent to an AGC, GAG, TTT, GTG, or CAA sequence. In some embodiments, the 3′ end of the target sequence is immediately adjacent to an NGA, NGCG, NGN, NNGRRT, NNNRRT, NGCG, NGCN, NGTN, NGTN, NGTN, or 5′ (TTTV) sequence.

[0578] It will be understood that the numbering of the specific positions or residues in the respective sequences depends on the particular protein and numbering scheme used. Numbering might be different, e.g., in precursors of a mature protein and the mature protein itself, and differences in sequences from species to species may affect numbering. One of skill in the art will be able to identify the respective residue in any homologous protein and in the respective encoding nucleic acid by methods well known in the art, e.g., by sequence alignment and determination of homologous residues.

[0579] It will be apparent to those of skill in the art that in order to target any of the fusion proteins disclosed herein, to a target site, e.g., a site comprising a mutation to be edited, it is typically necessary to co-express the fusion protein together with a guide RNA. As explained in more detail elsewhere herein, a guide RNA typically comprises a tracrRNA framework allowing for Cas9 binding, and a guide sequence, which confers sequence specificity to the Cas9:nucleic acid editing enzyme/domain fusion protein. Alternatively, the guide RNA and tracrRNA may be provided separately, as two nucleic acid molecules. In some embodiments, the guide RNA comprises a structure, wherein the guide sequence comprises a sequence that is complementary to the target sequence. The guide sequence is typically 20 nucleotides long. The sequences of suitable guide RNAs for targeting Cas9:nucleic acid editing enzyme/domain fusion proteins to specific genomic target sites will be apparent to those of skill in the art based on the instant disclosure. Such suitable guide RNA sequences typically comprise guide sequences that are complementary to a nucleic sequence within 50 nucleotides upstream or downstream of the target nucleotide to be edited. Some exemplary guide RNA sequences suitable for targeting any of the provided fusion proteins to specific target sequences are provided herein.

### Additional Domains

[0580] A base editor described herein can include any domain which helps to facilitate the nucleobase editing, modification or altering of a nucleobase of a polynucleotide. In some embodiments, a base editor comprises a polynucleotide programmable nucleotide binding domain (e.g., Cas9), a nucleobase editing domain (e.g., deaminase domain), and one or more additional domains. In some cases, the additional domain can facilitate enzymatic or catalytic functions of the base editor, binding functions of the base editor, or be inhibitors of cellular machinery (e.g., enzymes) that could interfere with the desired base editing result.

[0581] In some embodiments, a base editor can comprise a uracil glycosylase inhibitor (UGI) domain. A UGI domain can for example improve the efficiency of base editors comprising a cytidine deaminase domain by inhibiting the conversion of a U formed by deamination of a C back to the C nucleobase. In some cases, cellular DNA repair response to the presence of U:G heteroduplex DNA can be responsible for a decrease in nucleobase editing efficiency in cells. In such cases, uracil DNA glycosylase (UDG) can catalyze removal of U from DNA in cells, which can initiate base excision repair (BER), mostly resulting in reversion of the U:G pair to a C:G pair. In such cases, BER can be inhibited in base editors comprising one or more domains that bind the single strand, block the edited base, inhibit UGI, inhibit BER, protect the edited base, and/or promote repairing of the non-edited strand. Thus, this disclosure contemplates a base editor fusion protein comprising a UGI domain.

[0582] In some embodiments, a base editor comprises as a domain all or a portion of a double-strand break (DSB) binding protein. For example, a DSB binding protein can include a Gam protein of bacteriophage Mu that can bind to the ends of DSBs and can protect them from degradation. See Komor, A. C., et al., “Improved base excision repair inhibition and bacteriophage Mu Gam protein yields C:G-to-T:A base editors with higher efficiency and product purity” Science Advances 3:eaao4774 (2017), the entire content of which is hereby incorporated by reference.

[0583] In some embodiments, a base editor can comprise as a domain all or a portion of a nucleic acid polymerase (NAP). For example, a base editor can comprise all or a portion of a eukaryotic NAP. In some embodiments, a NAP or portion thereof incorporated into a base editor is a DNA polymerase. In some embodiments, a NAP or portion thereof incorporated into a base editor has translesion polymerase activity. In some cases, a NAP or portion thereof incorporated into a base editor is a translesion DNA polymerase. In some embodiments, a NAP or portion thereof incorporated into a base editor is a Rev7, Rev1 complex, polymerase iota, polymerase kappa, or polymerase eta. In some embodiments, a NAP or portion thereof incorporated into a base editor is a eukaryotic polymerase alpha, beta, gamma, delta, epsilon, gamma, eta, iota, kappa, lambda, mu, or nu component. In some embodiments, a NAP or portion thereof incorporated into a base editor comprises an amino acid sequence that is at least 75%, 80%, 85%, 90%, 95%, 96%, 97%, 98%, 99%, or 99.5% identical to a nucleic acid polymerase (e.g., a translesion DNA polymerase).

### Base Editor System

[0584] The base editor system provided herein comprises the steps of: (a) contacting a target nucleotide sequence of a polynucleotide (e.g., a double-stranded DNA or RNA, a single-stranded DNA or RNA) of a subject with a base editor system comprising an adenosine deaminase domain or a cytidine deaminase domain, wherein the aforementioned domains are fused to a polynucleotide binding domain, thereby forming a nucleobase editor capable of inducing changes at one or more bases within a nucleic acid molecule as described herein and at least one guide polynucleic acid (e.g., gRNA), wherein the target nucleotide sequence comprises a targeted nucleobase pair; (b) inducing strand separation of the target region; (c) converting a first nucleobase of the target nucleobase pair in a single strand of the target region to a second nucleobase; and (d) cutting no more than one strand of the target region, where a third nucleobase complementary to the first nucleobase base is replaced by a fourth nucleobase complementary to the second nucleobase. It should be appreciated that in some embodiments, step (b) is omitted. In some embodiments, the targeted nucleobase pair is a plurality of nucleobase pairs in one or more genes. In some embodiments, the base editor system provided herein is capable of multiplex editing of a plurality of nucleobase pairs in one or more genes. In some embodiments, the plurality of nucleobase pairs is located in the same gene. In some embodiments, the plurality of nucleobase pairs is located in one or more genes, wherein at least one gene is located in a different locus.

[0585] In some embodiments, the cut single strand (nicked strand) is hybridized to the guide nucleic acid. In some embodiments, the cut single strand is opposite to the strand comprising the first nucleobase. In some embodiments, the base editor comprises a Cas9 domain. In some embodiments, the first base is adenine, and the second base is not a G, C, A, or T. In some embodiments, the second base is inosine.

[0586] Base editing system as provided herein provides a new approach to genome editing that uses a fusion protein containing a catalytically defective Streptococcus pyogenes Cas9, a cytidine deaminase, and an inhibitor of base excision repair to induce programmable, single nucleotide (C→T or A→G) changes in DNA without generating double-strand DNA breaks, without requiring a donor DNA template, and without inducing an excess of stochastic insertions and deletions.

[0587] Provided herein are systems, compositions, and methods for editing a nucleobase using a base editor system. In some embodiments, the base editor system comprises a base editor (BE) comprising a polynucleotide programmable nucleotide binding domain and a nucleobase editing domain (e.g., deaminase domain) for editing the nucleobase; and a guide polynucleotide (e.g., guide RNA) in conjunction with the polynucleotide programmable nucleotide binding domain. In some embodiments, the base editor system comprises a base editor (BE) comprising a polynucleotide programmable nucleotide binding domain and a nucleobase editing domain (e.g., deaminase domain) for editing the nucleobase, and a guide polynucleotide (e.g., guide RNA) in conjunction with the polynucleotide programmable nucleotide binding domain. In some embodiments, the polynucleotide programmable nucleotide binding domain is a polynucleotide programmable DNA binding domain. In some embodiments, the polynucleotide programmable nucleotide binding domain is a polynucleotide programmable RNA binding domain. In some cases, a deaminase domain can be a cytosine deaminase or a cytidine deaminase, an adenine deaminase or an adenosine deaminase. In some embodiments, the terms “cytosine deaminase” and “cytidine deaminase” can be used interchangeably. In some embodiments, the terms “adenine deaminase” and “adenosine deaminase” can be used interchangeably. In some cases, a deaminase domain can be a cytosine deaminase or a cytidine deaminase. In some cases, a deaminase domain can be an adenine deaminase or an adenosine deaminase. Details of nucleobase editing proteins are described in International PCT Application Nos. PCT/2017/045381 (WO2018/027078) and PCT/US2016/058344 (WO2017/070632), each of which is incorporated herein by reference for its entirety. Also see Komor, A. C., et al., “Programmable editing of a target base in genomic DNA without double-stranded DNA cleavage” Nature 533, 420-424 (2016); Gaudelli, N. M., et al., “Programmable base editing of A⋅T to G⋅C in genomic DNA without DNA cleavage” Nature 551, 464-471 (2017); and Komor, A. C., et al., “Improved base excision repair inhibition and bacteriophage Mu Gam protein yields C:G-to-T:A base editors with higher efficiency and product purity” Science Advances 3:eaao4774 (2017), the entire contents of which are hereby incorporated by reference.

[0588] In some embodiments, a single guide polynucleotide may be utilized to target a deaminase to a target nucleic acid sequence. In some embodiments, a single pair of guide polynucleotides may be utilized to target different deaminases to a target nucleic acid sequence.

[0589] The nucleobase components and the polynucleotide programmable nucleotide binding component of a base editor system may be associated with each other covalently or non-covalently. For example, in some embodiments, the deaminase domain can be targeted to a target nucleotide sequence by a polynucleotide programmable nucleotide binding domain. In some embodiments, a polynucleotide programmable nucleotide binding domain can be fused or linked to a deaminase domain. In some embodiments, a polynucleotide programmable nucleotide binding domain can target a deaminase domain to a target nucleotide sequence by non-covalently interacting with or associating with the deaminase domain. For example, in some embodiments, the nucleobase editing component, e.g., the deaminase component can comprise an additional heterologous portion or domain that is capable of interacting with, associating with, or capable of forming a complex with an additional heterologous portion or domain that is part of a polynucleotide programmable nucleotide binding domain. In some embodiments, the additional heterologous portion may be capable of binding to, interacting with, associating with, or forming a complex with a polypeptide. In some embodiments, the additional heterologous portion may be capable of binding to, interacting with, associating with, or forming a complex with a polynucleotide. In some embodiments, the additional heterologous portion may be capable of binding to a guide polynucleotide. In some embodiments, the additional heterologous portion may be capable of binding to a polypeptide linker. In some embodiments, the additional heterologous portion may be capable of binding to a polynucleotide linker. The additional heterologous portion may be a protein domain. In some embodiments, the additional heterologous portion may be a K Homology (KH) domain, a MS2 coat protein domain, a PP7 coat protein domain, a SfMu Com coat protein domain, a steril alpha motif, a telomerase Ku binding motif and Ku protein, a telomerase Sm7 binding motif and Sm7 protein, or a RNA recognition motif.

[0590] A base editor system may further comprise a guide polynucleotide component. It should be appreciated that components of the base editor system may be associated with each other via covalent bonds, noncovalent interactions, or any combination of associations and interactions thereof. In some embodiments, a deaminase domain can be targeted to a target nucleotide sequence by a guide polynucleotide. For example, in some embodiments, the nucleobase editing component of the base editor system, e.g., the deaminase component, can comprise an additional heterologous portion or domain (e.g., polynucleotide binding domain such as an RNA or DNA binding protein) that is capable of interacting with, associating with, or capable of forming a complex with a portion or segment (e.g., a polynucleotide motif) of a guide polynucleotide. In some embodiments, the additional heterologous portion or domain (e.g., polynucleotide binding domain such as an RNA or DNA binding protein) can be fused or linked to the deaminase domain. In some embodiments, the additional heterologous portion may be capable of binding to, interacting with, associating with, or forming a complex with a polypeptide. In some embodiments, the additional heterologous portion may be capable of binding to, interacting with, associating with, or forming a complex with a polynucleotide. In some embodiments, the additional heterologous portion may be capable of binding to a guide polynucleotide. In some embodiments, the additional heterologous portion may be capable of binding to a polypeptide linker. In some embodiments, the additional heterologous portion may be capable of binding to a polynucleotide linker. The additional heterologous portion may be a protein domain. In some embodiments, the additional heterologous portion may be a K Homology (KH) domain, a MS2 coat protein domain, a PP7 coat protein domain, a SfMu Com coat protein domain, a sterile alpha motif, a telomerase Ku binding motif and Ku protein, a telomerase Sm7 binding motif and Sm7 protein, or a RNA recognition motif.

[0591] In some embodiments, a base editor system can further comprise an inhibitor of base excision repair (BER) component. It should be appreciated that components of the base editor system may be associated with each other via covalent bonds, noncovalent interactions, or any combination of associations and interactions thereof. The inhibitor of BER component may comprise a base excision repair inhibitor. In some embodiments, the inhibitor of base excision repair can be a uracil DNA glycosylase inhibitor (UGI). In some embodiments, the inhibitor of base excision repair can be an inosine base excision repair inhibitor. In some embodiments, the inhibitor of base excision repair can be targeted to the target nucleotide sequence by the polynucleotide programmable nucleotide binding domain. In some embodiments, a polynucleotide programmable nucleotide binding domain can be fused or linked to an inhibitor of base excision repair. In some embodiments, a polynucleotide programmable nucleotide binding domain can be fused or linked to a deaminase domain and an inhibitor of base excision repair. In some embodiments, a polynucleotide programmable nucleotide binding domain can target an inhibitor of base excision repair to a target nucleotide sequence by non-covalently interacting with or associating with the inhibitor of base excision repair. For example, in some embodiments, the inhibitor of base excision repair component can comprise an additional heterologous portion or domain that is capable of interacting with, associating with, or capable of forming a complex with an additional heterologous portion or domain that is part of a polynucleotide programmable nucleotide binding domain. In some embodiments, the inhibitor of base excision repair can be targeted to the target nucleotide sequence by the guide polynucleotide. For example, in some embodiments, the inhibitor of base excision repair can comprise an additional heterologous portion or domain (e.g., polynucleotide binding domain such as an RNA or DNA binding protein) that is capable of interacting with, associating with, or capable of forming a complex with a portion or segment (e.g., a polynucleotide motif) of a guide polynucleotide. In some embodiments, the additional heterologous portion or domain of the guide polynucleotide (e.g., polynucleotide binding domain such as an RNA or DNA binding protein) can be fused or linked to the inhibitor of base excision repair. In some embodiments, the additional heterologous portion may be capable of binding to, interacting with, associating with, or forming a complex with a polynucleotide. In some embodiments, the additional heterologous portion may be capable of binding to a guide polynucleotide. In some embodiments, the additional heterologous portion may be capable of binding to a polypeptide linker. In some embodiments, the additional heterologous portion may be capable of binding to a polynucleotide linker. The additional heterologous portion may be a protein domain. In some embodiments, the additional heterologous portion may be a K Homology (KH) domain, a MS2 coat protein domain, a PP7 coat protein domain, a SfMu Com coat protein domain, a sterile alpha motif, a telomerase Ku binding motif and Ku protein, a telomerase Sm7 binding motif and Sm7 protein, or a RNA recognition motif.

[0592] In some embodiments, the base editor inhibits base excision repair of the edited strand. In some embodiments, the base editor protects or binds the non-edited strand. In some embodiments, the base editor comprises UGI activity. In some embodiments, the base editor comprises a catalytically inactive inosine-specific nuclease. In some embodiments, the base editor comprises nickase activity. In some embodiments, the intended edit of base pair is upstream of a PAM site. In some embodiments, the intended edit of base pair is 1, 2, 3, 4, 5, 6, 7, 8, 9, 10, 11, 12, 13, 14, 15, 16, 17, 18, 19, or 20 nucleotides upstream of the PAM site. In some embodiments, the intended edit of base-pair is downstream of a PAM site. In some embodiments, the intended edited base pair is 1, 2, 3, 4, 5, 6, 7, 8, 9, 10, 11, 12, 13, 14, 15, 16, 17, 18, 19, or 20 nucleotides downstream stream of the PAM site.

[0593] In some embodiments, the method does not require a canonical (e.g., NGG) PAM site. In some embodiments, the nucleobase editor comprises a linker or a spacer. In some embodiments, the linker or spacer is 1-25 amino acids in length. In some embodiments, the linker or spacer is 5-20 amino acids in length. In some embodiments, the linker or spacer is 10, 11, 12, 13, 14, 15, 16, 17, 18, 19, or 20 amino acids in length.

[0594] In some embodiments, the target region comprises a target window, wherein the target window comprises the target nucleobase pair. In some embodiments, the target window comprises 1-10 nucleotides. In some embodiments, the target window is 1, 2, 3, 4, 5, 6, 7, 8, 9, 10, 11, 12, 13, 14, 15, 16, 17, 18, 19, or 20 nucleotides in length. In some embodiments, the intended edit of base pair is within the target window. In some embodiments, the target window comprises the intended edit of base pair. In some embodiments, the method is performed using any of the base editors provided herein. In some embodiments, a target window is a deamination window.

[0595] In some embodiments, non-limiting exemplary cytidine base editors (CBE) include BE1 (APOBEC1-XTEN-dCas9), BE2 (APOBEC1-XTEN-dCas9-UGI), BE3 (APOBEC1-XTEN-dCas9 (A840H)-UGI), BE3-Gam, saBE3, saBE4-Gam, BE4, BE4-Gam, saBE4, or saB4E-Gam. BE4 extends the APOBEC1-Cas9n (D10A) linker to 32 amino acids and the Cas9n-UGI linker to 9 amino acids, and appends a second copy of UGI to the C-terminus of the construct with another 9-amino acid linker into a single base editor construct. The base editors saBE3 and saBE4 have the S. pyogenes Cas9n (D10A) replaced with the smaller S. aureus Cas9n (D10A). BE3-Gam, saBE3-Gam, BE4-Gam, and saBE4-Gam have 174 residues of Gam protein fused to the N-terminus of BE3, saBE3, BE4, and saBE4 via the 16 amino acid XTEN linker.

[0596] In some embodiments, the adenosine base editor (ABE) can deaminate adenine in DNA. In some embodiments, ABE is generated by replacing APOBEC1 component of BE3 with natural or engineered E. coli TadA, human ADAR2, mouse ADA, or human ADAT2. In some embodiments, ABE comprises evolved TadA variant. In some embodiments, the ABE is ABE 1.2 (TadA*-XTEN-nCas9-NLS). In some embodiments, TadA* comprises A106V and D108N mutations.

[0597] In some embodiments, the ABE is a second-generation ABE. In some embodiments, the ABE is ABE2.1, which comprises additional mutations D147Y and E155V in TadA* (TadA*2.1). In some embodiments, the ABE is ABE2.2, ABE2.1 fused to catalytically inactivated version of human alkyl adenine DNA glycosylase (AAG with E125Q mutation). In some embodiments, the ABE is ABE2.3, ABE2.1 fused to catalytically inactivated version of E. coli Endo V (inactivated with D35A mutation). In some embodiments, the ABE is ABE2.6 which has a linker twice as long (32 amino acids, (SGGS)₂-XTEN-(SGGS)₂) as the linker in ABE2.1. In some embodiments, the ABE is ABE2.7, which is ABE2.1 tethered with an additional wild-type TadA monomer. In some embodiments, the ABE is ABE2.8, which is ABE2.1 tethered with an additional TadA*2.1 monomer. In some embodiments, the ABE is ABE2.9, which is a direct fusion of evolved TadA (TadA*2.1) to the N-terminus of ABE2.1. In some embodiments, the ABE is ABE2.10, which is a direct fusion of wild type TadA to the N-terminus of ABE2.1. In some embodiments, the ABE is ABE2.11, which is ABE2.9 with an inactivating E59A mutation at the N-terminus of TadA* monomer. In some embodiments, the ABE is ABE2.12, which is ABE2.9 with an inactivating E59A mutation in the internal TadA* monomer.

[0598] In some embodiments, the ABE is a third generation ABE. In some embodiments, the ABE is ABE3.1, which is ABE2.3 with three additional TadA mutations (L84F, H123Y, and I157F).

[0599] In some embodiments, the ABE is a fourth generation ABE. In some embodiments, the ABE is ABE4.3, which is ABE3.1 with an additional TadA mutation A142N (TadA*4.3).

[0600] In some embodiments, the ABE is a fifth generation ABE. In some embodiments, the ABE is ABE5.1, which is generated by importing a consensus set of mutations from surviving clones (H36L, R51L, S146C, and K157N) into ABE3.1. In some embodiments, the ABE is ABE5.3, which has a heterodimeric construct containing wild-type E. coli TadA fused to an internal evolved TadA*. In some embodiments, the ABE is ABE5.2, ABE5.4, ABE5.5, ABE5.6, ABE5.7, ABE5.8, ABE5.9, ABE5.10, ABE5.11, ABE5.12, ABE5.13, or ABE5.14, as shown in below Table 6. In some embodiments, the ABE is a sixth generation ABE. In some embodiments, the ABE is ABE6.1, ABE6.2, ABE6.3, ABE6.4, ABE6.5, or ABE6.6, as shown in below Table 6. In some embodiments, the ABE is a seventh generation ABE. In some embodiments, the ABE is ABE7.1, ABE7.2, ABE7.3, ABE7.4, ABE7.5, ABE7.6, ABE7.7, ABE7.8, ABE 7.9, or ABE7.10, as shown in Table 6 below.

TABLE 6
Genotypes of ABEs

| | 23 | 26 | 36 | 37 | 48 | 49 | 51 | 72 | 84 | 87 | 106 | 108 | 123 | 125 | 142 | 146 | 147 | 152 | 155 | 156 | 157 | 161 |
|---|---|---|---|---|---|---|---|---|---|---|---|---|---|---|---|---|---|---|---|---|---|---|
| ABE0.1 | W | R | H | N | P | | R | N | L | S | A | D | H | G | A | S | D | R | E | I | K | K |
| ABE0.2 | W | R | H | N | P | | R | N | L | S | A | D | H | G | A | S | D | R | E | I | K | K |
| ABE1.1 | W | R | H | N | P | | R | N | L | S | A | N | H | G | A | S | D | R | E | I | K | K |
| ABE1.2 | W | R | H | N | P | | R | N | L | S | V | N | H | G | A | S | D | R | E | I | K | K |
| ABE2.1 | W | R | H | N | P | | R | N | L | S | V | N | H | G | A | S | D | R | E | I | K | K |
| ABE2.2 | W | R | H | N | P | | R | N | L | S | V | N | H | G | A | S | D | R | E | I | K | K |
| ABE2.3 | W | R | H | N | P | | R | N | L | S | V | N | H | G | A | S | D | R | E | I | K | K |
| ABE2.4 | W | R | H | N | P | | R | N | L | S | V | N | H | G | A | S | D | R | E | I | K | K |
| ABE2.5 | W | R | H | N | P | | R | N | L | S | V | N | H | G | A | S | D | R | E | I | K | K |
| ABE2.6 | W | R | H | N | P | | R | N | L | S | V | N | H | G | A | S | D | R | E | I | K | K |
| ABE2.7 | W | R | H | N | P | | R | N | L | S | V | N | H | G | A | S | D | R | E | I | K | K |
| ABE2.8 | W | R | H | N | P | | R | N | L | S | V | N | H | G | A | S | D | R | E | I | K | K |
| ABE2.9 | W | R | H | N | P | | R | N | L | S | V | N | H | G | A | S | D | R | E | I | K | K |
| ABE2.10 | W | R | H | N | P | | R | N | L | S | V | N | H | G | A | S | D | R | E | I | K | K |
| ABE2.11 | W | R | H | N | P | | R | N | L | S | V | N | H | G | A | S | D | R | E | I | K | K |
| ABE2.12 | W | R | H | N | P | | R | N | L | S | V | N | H | G | A | S | D | R | E | I | K | K |
| ABE3.1 | W | R | H | N | P | | R | N | F | S | V | N | Y | G | A | S | D | R | E | F | K | K |
| ABE3.2 | W | R | H | N | P | | R | N | F | S | V | N | Y | G | A | S | D | R | E | F | K | K |
| ABE3.3 | W | R | H | N | P | | R | N | F | S | V | N | Y | G | A | S | D | R | E | F | K | K |
| ABE3.4 | W | R | H | N | P | | R | N | F | S | V | N | Y | G | A | S | D | R | E | F | K | K |
| ABE3.5 | W | R | H | N | P | | R | N | F | S | V | N | Y | G | A | S | D | R | E | F | K | K |
| ABE3.6 | W | R | H | N | P | | R | N | F | S | V | N | Y | G | A | S | D | R | E | F | K | K |
| ABE3.7 | W | R | H | N | P | | R | N | F | S | V | N | Y | G | A | S | D | R | E | F | K | K |
| ABE3.8 | W | R | H | N | P | | R | N | F | S | V | N | Y | G | A | S | D | R | E | F | K | K |
| ABE4.1 | W | R | H | N | P | | R | N | L | S | V | N | H | G | N | S | D | R | E | I | K | K |
| ABE4.2 | W | G | H | N | P | | R | N | L | S | V | N | H | G | N | S | D | R | E | I | K | K |
| ABE4.3 | W | R | H | N | P | | R | N | F | S | V | N | Y | G | N | S | D | R | E | F | K | K |
| ABE5.1 | W | R | L | N | P | | L | N | F | S | V | N | Y | G | A | C | D | R | E | F | N | T |
| ABE5.2 | W | R | H | S | P | | R | N | I | S | V | N | Y | G | A | S | D | R | E | F | K | K |
| ABE5.3 | W | R | L | N | P | | L | N | F | S | V | N | Y | G | A | C | D | R | E | F | N | T |
| ABE5.4 | W | R | H | S | P | | R | N | F | S | V | N | Y | G | A | S | D | R | E | F | K | K |
| ABE5.5 | W | R | L | N | P | | L | N | F | S | V | N | Y | G | A | C | D | R | E | F | N | K |
| ABE5.6 | W | R | L | N | P | | L | N | F | S | V | N | Y | G | A | C | D | R | E | F | N | K |
| ABE5.7 | W | R | L | N | P | | L | N | F | S | V | N | Y | G | A | C | D | R | E | F | N | K |
| ABE5.8 | W | R | L | N | P | | L | N | F | S | V | N | Y | G | A | C | D | R | E | F | N | K |
| ABE5.9 | W | R | L | N | P | | L | N | F | S | V | N | Y | G | A | C | D | R | E | F | N | K |
| ABE5.10 | W | R | L | N | P | | L | N | F | S | V | N | Y | G | A | C | D | R | E | F | N | K |
| ABE5.11 | W | R | L | N | P | | L | N | F | S | V | N | Y | G | A | C | D | R | E | F | N | K |
| ABE5.12 | W | R | L | N | P | | L | N | F | S | V | N | Y | G | A | C | D | R | E | F | N | K |
| ABE5.13 | W | R | H | N | P | | L | D | F | S | V | N | Y | A | A | S | D | R | E | F | K | K |
| ABE5.14 | W | R | H | N | S | | L | N | F | C | V | N | Y | G | A | S | D | R | E | F | K | K |
| ABE6.1 | W | R | H | N | S | | L | N | F | S | V | N | Y | G | N | S | D | R | E | F | K | K |
| ABE6.2 | W | R | H | N | P | V | L | N | F | S | V | N | Y | G | N | S | Y | R | V | F | N | K |
| ABE6.3 | W | R | L | N | T | | L | N | F | S | V | N | Y | G | A | C | Y | R | V | F | N | K |
| ABE6.4 | W | R | L | N | S | | L | N | F | S | V | N | Y | G | N | C | Y | R | V | F | N | K |
| ABE6.5 | W | R | L | N | S | V | L | N | F | S | V | N | Y | G | A | C | Y | R | V | F | N | K |
| ABE6.6 | W | R | L | N | T | V | L | N | F | S | V | N | Y | G | N | C | Y | R | V | F | N | K |
| ABE7.1 | W | R | L | N | T | | L | N | F | S | V | N | Y | G | A | C | Y | R | V | F | N | K |
| ABE7.2 | W | R | L | N | A | | L | N | F | S | V | N | Y | G | N | C | Y | R | V | F | N | K |
| ABE7.3 | L | R | L | N | A | | L | N | F | S | V | N | Y | G | A | C | Y | R | V | F | N | K |
| ABE7.4 | R | R | L | N | A | | L | N | F | S | V | N | Y | G | A | C | Y | R | V | F | N | K |
| ABE7.5 | W | R | L | N | A | | L | N | F | S | V | N | Y | G | A | C | Y | H | V | F | N | K |
| ABE7.6 | W | R | L | N | A | | L | N | I | S | V | N | Y | G | A | C | Y | P | V | F | N | K |
| ABE7.7 | L | R | L | N | A | | L | N | F | S | V | N | Y | G | A | C | Y | P | V | F | N | K |
| ABE7.8 | L | R | L | N | A | | L | N | F | S | V | N | Y | G | N | C | Y | R | V | F | N | K |
| ABE7.9 | L | R | L | N | A | | L | N | F | S | V | N | Y | G | N | C | Y | P | V | F | N | K |
| ABE7.10 | R | R | L | N | A | | L | N | F | S | V | N | Y | G | A | C | Y | P | V | F | N | K |

[0601] In some embodiments, the adenosine base editor is an eighth generation ABE (ABE8). In some embodiments, the ABE8 contains a TadA*8 variant. In some embodiments, the ABE8 is a monomeric construct containing a TadA*8 variant. In some embodiments, the ABE8 is ABE8.1, which has a monomeric construct containing TadA*7.10 with a Y147T mutation (TadA*8.1). In some embodiments, the ABE8 is ABE8.2, which has a monomeric construct containing TadA*7.10 with a Y147R mutation (TadA*8.2). In some embodiments, the ABE8 is ABE8.3, which has a monomeric construct containing TadA*7.10 with a Q154S mutation (TadA*8.2). In some embodiments, the ABE8 is ABE8.4, which has a monomeric construct containing TadA*7.10 with a Y123H mutation (TadA*8.3). In some embodiments, the ABE8 is ABE8.5, which has a monomeric construct containing TadA*7.10 with a V82S mutation (TadA*8.4). In some embodiments, the ABE8 is ABE8.6, which has a monomeric construct containing TadA*7.10 with a T166R mutation (TadA*8.6). In some embodiments, the ABE8 is ABE8.7, which has a monomeric construct containing TadA*7.10 with a Q154R mutation (TadA*8.7). In some embodiments, the ABE8 is ABE8.8, which has a monomeric construct containing TadA*7.10 with Y147R, Q154R, and Y123H mutations (TadA*8.8). In some embodiments, the ABE8 is ABE8.9, which has a monomeric construct containing TadA*7.10 with Y147R, Q154R and I76Y mutations (TadA*8.9). In some embodiments, the ABE8 is ABE8.10, which has a monomeric construct containing TadA*7.10 with Y147R, Q154R, and T166R mutations (TadA*8.10). In some embodiments, the ABE8 is ABE8.11, which has a monomeric construct containing TadA*7.10 with Y147T and Q154R mutations (TadA*8.11). In some embodiments, the ABE8 is ABE8.12, which has a monomeric construct containing TadA*7.10 with Y147T and Q154S mutations (TadA*8.12). In some embodiments, the ABE8 is ABE8.13, which has a monomeric construct containing TadA*7.10 with Y123H, Y147R, and I76Y mutations (TadA*8.13).

[0602] In some embodiments, the ABE8 has a heterodimeric construct containing wild-type E. coli TadA fused to a TadA*8 variant. In some embodiments, the ABE8 is ABE8.14, which has a heterodimeric construct containing wild-type E. coli TadA fused to TadA*7.10 with a Y147T mutation (TadA*8.14). In some embodiments, the ABE8 is ABE8.15, which has a heterodimeric construct containing wild-type E. coli TadA fused to TadA*7.10 with a Y147R mutation (TadA*8.15). In some embodiments, the ABE8 is ABE8.16, which has a heterodimeric construct containing wild-type E. coli TadA fused to TadA*7.10 with a Q154S mutation (TadA*8.16). In some embodiments, the ABE8 is ABE8.17, which has a heterodimeric construct containing wild-type E. coli TadA fused to Tad*7.10 with a Y123H mutation (TadA*8.17). In some embodiments, the ABE8 is ABE8.18, which has a heterodimeric construct containing wild-type E. coli TadA fused to TadA*7.10 with a V82S mutation (TadA*8.18). In some embodiments, the ABE8 is ABE8.19, which has a heterodimeric construct containing wild-type E. coli TadA fused to TadA*7.10 with a T166R mutation (TadA*8.19). In some embodiments, the ABE8 is ABE8.20, which has a heterodimeric construct containing wild-type E. coli TadA fused to TadA*7.10 with a Q154R mutation (TadA*8.20). In some embodiments, the ABE8 is ABE8.21, which has a heterodimeric construct containing wild-type E. coli TadA fused to TadA*7.10 with Y147R, Q154R, and Y123H mutations (TadA*8.21). In some embodiments, the ABE8 is ABE8.22, which has a heterodimeric construct containing wild-type E. coli TadA fused to TadA*7.10 with Y147R, Q154R and I76Y mutations (TadA*8.22). In some embodiments, the ABE8 is ABE8.23, which has a heterodimeric construct containing wild-type E. coli TadA fused to TadA*7.10 with Y147R, Q154R, and T166R mutations (TadA*8.23). In some embodiments, the ABE8 is ABE8.24, which has a heterodimeric construct containing wild-type E. coli TadA fused to TadA*7.10 with Y147T and Q154R mutations (TadA*8.24). In some embodiments, the ABE8 is ABE8.25, which has a heterodimeric construct containing wild-type E. coli TadA fused to TadA*7.10 with Y147T and Q154S mutations (TadA*8.25). In some embodiments, the ABE8 is ABE8.26, which has a heterodimeric construct containing wild-type E. coli TadA fused to TadA*7.10 with Y123H, Y147R, and I76Y mutations (TadA*8.26).

[0603] In some embodiments the ABE is ABE8.1, ABE8.2, ABE8.3, ABE8.4, ABE8.5, ABE8.6, ABE8.6, ABE8.7, ABE8.8, ABE8.9, ABE8.10, ABE8.11, ABE8.12, ABE8.13, ABE8.14, ABE8.15, ABE8.16, ABE8.17, ABE8.18, ABE8.19, ABE8.20, ABE8.21, ABE8.22, ABE8.23, ABE8.24, ABE8.25, or ABE8.26, as shown in Table 7A below.

TABLE 7A
ABE8 base editors

| ABE8 Base | Adenosine | |
|---|---|---|
| Editor | Deaminase | Adenosine Deaminase Description |
| ABE8.1 | TadA*8.1 | Monomer_TadA*7.10 + Y147T |
| ABE8.2 | TadA*8.2 | Monomer_TadA*7.10 + Y147R |
| ABE8.3 | TadA*8.3 | Monomer_TadA*7.10 + Q154S |
| ABE8.4 | TadA*8.4 | Monomer_TadA*7.10 + Y123H |
| ABE8.5 | TadA*8.5 | Monomer_TadA*7.10 + V82S |
| ABE8.6 | TadA*8.6 | Monomer_TadA*7.10 + T166R |
| ABE8.7 | TadA*8.7 | Monomer_TadA*7.10 + Q154R |
| ABE8.8 | TadA*8.8 | Monomer_TadA*7.10 + Y147R_Q154R_Y123H |
| ABE8.9 | TadA*8.9 | Monomer_TadA*7.10 + Y147R_Q154R_I76Y |
| ABE8.10 | TadA*8.10 | Monomer_TadA*7.10 + Y147R_Q154R_T166R |
| ABE8.11 | TadA*8.11 | Monomer_TadA*7.10 + Y147T_Q154R |
| ABE8.12 | TadA*8.12 | Monomer_TadA*7.10 + Y147T_Q154S |
| ABE8.13 | TadA*8.13 | Monomer_TadA*7.10 + H123H_Y147R_Q154R_I76Y |
| ABE8.14 | TadA*8.14 | Heterodimer_(WT) + (TadA*7.10 + Y147T) |
| ABE8.15 | TadA*8.15 | Heterodimer_(WT) + (TadA*7.10 + Y147R) |
| ABE8.16 | TadA*8.16 | Heterodimer_(WT) + (TadA*7.10 + Q154S) |
| ABE8.17 | TadA*8.17 | Heterodimer_(WT) + (TadA*7.10 + Y123H) |
| ABE8.18 | TadA*8.18 | Heterodimer_(WT) + (TadA*7.10 + V82S) |
| ABE8.19 | TadA*8.19 | Heterodimer_(WT) + (TadA*7.10 + T166R) |
| ABE8.20 | TadA*8.20 | Heterodimer_(WT) + (TadA*7.10 + Q154R) |
| ABE8.21 | TadA*8.21 | Heterodimer_(WT) + (TadA*7.10 + Y147R_Q154R_Y123H) |
| ABE8.22 | TadA*8.22 | Heterodimer_(WT) + (TadA*7.10 + Y147R_Q154R_I76Y) |
| ABE8.23 | TadA*8.23 | Heterodimer_(WT) + (TadA*7.10 + Y147R_Q154R_T166R) |
| ABE8.24 | TadA*8.24 | Heterodimer_(WT) + (TadA*7.10 + Y147T_Q154R) |
| ABE8.25 | TadA*8.25 | Heterodimer_(WT) + (TadA*7.10 + Y147T_Q154S) |
| ABE8.26 | TadA*8.26 | Heterodimer_(WT) + (TadA*7.10 + H123H_Y147T_Q154R_I76Y) |

[0604] In some embodiments, the ABE has a genotype as shown in Table 7A-1 below:

TABLE 7A-1
Genotypes of ABEs

| | 23 | 26 | 36 | 37 | 48 | 49 | 51 | 72 | 84 | 87 | 105 | 108 | 123 | 125 | 142 | 145 | 147 | 152 | 155 | 156 | 157 | 161 |
|---|---|---|---|---|---|---|---|---|---|---|---|---|---|---|---|---|---|---|---|---|---|---|
| ABE7.9 | L | R | L | N | A | | L | N | F | S | V | N | Y | G | N | C | Y | P | C | F | N | K |
| ABE7.10 | R | R | L | N | A | | L | N | F | S | V | N | Y | G | A | C | Y | P | C | F | N | K |

As shown in Table 7A-2 below, genotypes of 40 ABE8s are described. Residue positions in the evolved E. coli TadA portion of ABE are indicated. Mutational changes in ABE8 are shown when distinct from ABE7.10 mutations. In some embodiments, the ABE has a genotype of one of the ABEs as shown in Table 7A-2 below.

TABLE 7A-2
Residue Identity in Evolved TadA

| | 23 | 36 | 48 | 51 | 76 | 82 | 84 | 106 | 108 | 123 | 146 | 147 | 152 | 154 | 155 | 156 | 157 | 166 |
|---|---|---|---|---|---|---|---|---|---|---|---|---|---|---|---|---|---|---|
| ABE7.10 | R | L | A | L | I | V | F | V | N | Y | C | Y | P | Q | V | F | N | T |
| ABE8.1-m | | | | | | | | | | | | T | | | | | | |
| ABE8.2-m | | | | | | | | | | | | R | | | | | | |
| ABE8.3-m | | | | | | | | | | | | | | S | | | | |
| ABE8.4-m | | | | | | | | | | H | | | | | | | | |
| ABE8.5-m | | | | | | S | | | | | | | | | | | | |
| ABE8.6-m | | | | | | | | | | | | | | | | | | R |
| ABE8.7-m | | | | | | | | | | | | | | R | | | | |
| ABE8.8-m | | | | | | | | | | H | | R | | R | | | | |
| ABE8.9-m | | | | | Y | | | | | | | R | | R | | | | |
| ABE8.10-m | | | | | | | | | | | | R | | R | | | | R |
| ABE8.11-m | | | | | | | | | | | | T | | R | | | | |
| ABE8.12-m | | | | | | | | | | | | T | | S | | | | |
| ABE8.13-m | | | | | Y | | | | | H | | R | | R | | | | |
| ABE8.14-m | | | | | Y | S | | | | | | | | | | | | |
| ABE8.15-m | | | | | | S | | | | | | R | | | | | | |
| ABE8.16-m | | | | | | S | | | | H | | R | | | | | | |
| ABE8.17-m | | | | | | S | | | | | | | | R | | | | |
| ABE8.18-m | | | | | | S | | | | H | | | | R | | | | |
| ABE8.19-m | | | | | | S | | | | H | | R | | R | | | | |
| ABE8.20-m | | | | | Y | S | | | | H | | R | | R | | | | |
| ABE8.21-m | | | | | | | | | | | | R | | S | | | | |
| ABE8.22-m | | | | | | S | | | | | | | | S | | | | |
| ABE8.23-m | | | | | | S | | | | H | | | | | | | | |
| ABE8.24-m | | | | | | S | | | | H | | T | | | | | | |
| ABE8.1-d | | | | | | | | | | | | T | | | | | | |
| ABE8.2-d | | | | | | | | | | | | R | | | | | | |
| ABE8.3-d | | | | | | | | | | | | | | S | | | | |
| ABE8.4-d | | | | | | | | | | H | | | | | | | | |
| ABE8.5-d | | | | | | S | | | | | | | | | | | | |
| ABE8.6-d | | | | | | | | | | | | | | | | | | R |
| ABE8.7-d | | | | | | | | | | | | | | R | | | | |
| ABE8.8-d | | | | | | | | | | H | | R | | R | | | | |
| ABE8.9-d | | | | | Y | | | | | | | R | | R | | | | |
| ABE8.10-d | | | | | | | | | | | | R | | R | | | | R |
| ABE8.11-d | | | | | | | | | | | | T | | R | | | | |
| ABE8.12-d | | | | | | | | | | | | T | | S | | | | |
| ABE8.13-d | | | | | Y | | | | | H | | R | | R | | | | |
| ABE8.14-d | | | | | Y | S | | | | | | | | | | | | |
| ABE8.15-d | | | | | | S | | | | | | R | | | | | | |
| ABE8.16-d | | | | | | S | | | | H | | R | | | | | | |
| ABE8.17-d | | | | | | S | | | | | | | | R | | | | |
| ABE8.18-d | | | | | | S | | | | H | | | | R | | | | |
| ABE8.19-d | | | | | | S | | | | H | | R | | R | | | | |
| ABE8.20-d | | | | | Y | S | | | | H | | R | | R | | | | |
| ABE8.21-d | | | | | | | | | | | | R | | S | | | | |
| ABE8.22-d | | | | | | S | | | | | | | | S | | | | |
| ABE8.23-d | | | | | | S | | | | H | | | | | | | | |
| ABE8.24-d | | | | | | S | | | | H | | T | | | | | | |

[0605] In some embodiments, base editors (e.g., ABE8) are generated by cloning an adenosine deaminase variant (e.g., TadA*8) into a scaffold that includes a circular permutant Cas9 (e.g., CP5) and a bipartite nuclear localization sequence. In some embodiments, the base editor (e.g., ABE7.9, ABE7.10, or ABE8) is a NGC PAM CP5 variant (S. pyrogenes Cas9 or spVRQR Cas9). In some embodiments, the base editor (e.g., ABE7.9, ABE7.10, or ABE8) is a AGA PAM CP5 variant (S. pyrogenes Cas9 or spVRQR Cas9).

[0606] In some embodiments, the base editor is ABE8.1, which comprises or consists essentially of the following sequence or a fragment thereof having adenosine deaminase activity:

ABE8.1_Y147T_CP5_NGC PAM_monomer
MSEVEFSHEYWMRHALTLAKRARDEREVPVGAVLVLNNRVIGEGWNRAIGLHDPTAHAEIMA
LRQGGLVMQNYRLIDATLYVTFEPCVMCAGAMIHSRIGRVVFGVRNAKTGAAGSLMDVLHYP
GMNHRVEITEGILADECAALLCTFFRMPRQVFNAQKKAQSSTD [symbol] [symbol]
EIGKATAKYFFYSNIMNFFKTEITLANGEIRKRPLIETNGETGEIVWDK
GRDFATVRKVLSMPQVNIVKKTEVQTGGFSKESILPKRNSDKLIARKKDWDPKKYGGFMQPT
VAYSVLVVAKVEKGKSKKLKSVKELLGITIMERSSFEKNPIDFLEAKGYKEVKKDLIIKLPK
YSLFELENGRKRMLASAKFLQKGNELALPSKYVNFLYLASHYEKLKGSPEDNEQKQLFVEQH
KHYLDEIIEQISEFSKRVILADANLDKVLSAYNKHRDKPIREQAENIIHLFTLTNLGAPRAF
KYFDTTIARKEYRSTKEVLDATLIHQSITGLYETRIDLSQLGGD [symbol] [symbol]
DKKYSIGLAIGTNSVGWAVITDEYKVPSKKFKVLGNTDRHSIKKNLIGALLFDSGETAE
ATRLKRTARRRYTRRKNRICYLQEIFSNEMAKVDDSFFHRLEESFLVEEDKKHERHPIFGNI
VDEVAYHEKYPTIYHLRKKLVDSTDKADLRLIYLALAHMIKFRGHFLIEGDLNPDNSDVDKL
FIQLVQTYNQLFEENPINASGVDAKAILSARLSKSRRLENLIAQLPGEKKNGLFGNLIALSL
GLTPNFKSNFDLAEDAKLQLSKDTYDDDLDNLLAQIGDQYADLFLAAKNLSDAILLSDILRV
NTEITKAPLSASMIKRYDEHHQDLTLLKALVRQQLPEKYKEIFFDQSKNGYAGYIDGGASQE
EFYKFIKPILEKMDGTEELLVKLNREDLLRKQRTFDNGSIPHQIHLGELHAILRRQEDFYPF
LKDNREKIEKILTFRIPYYVGPLARGNSRFAWMTRKSEETITPWNFEEVVDKGASAQSFIER
MTNFDKNLPNEKVLPKHSLLYEYFTVYNELTKVKYVTEGMRKPAFLSGEQKKAIVDLLFKTN
RKVTVKQLKEDYFKKIECFDSVEISGVEDRFNASLGTYHDLLKIIKDKDFLDNEENEDILED
IVLTLTLFEDREMIEERLKTYAHLFDDKVMKQLKRRRYTGWGRLSRKLINGIRDKQSGKTIL
DFLKSDGFANRNFMQLIHDDSLTFKEDIQKAQVSGQGDSLHEHIANLAGSPAIKKGILQTVK
VVDELVKVMGRHKPENIVIEMARENQTTQKGQKNSRERMKRIEEGIKELGSQILKEHPVENT
QLQNEKLYLYYLQNGRDMYVDQELDINRLSDYDVDHIVPQSFLKDDSIDNKVLTRSDKNRGK
SDNVPSEEVVKKMKNYWRQLLNAKLITQRKFDNLTKAERGGLSELDKAGFIKRQLVETRQIT
KHVAQILDSRMNTKYDENDKLIREVKVITLKSKLVSDFRKDFQFYKVREINNYHHAHDAYLN
AVVGTALIKKYPKLESEFVYGDYKVYDVRKMIAKSEQEGADKRTADGSEFESPKKKRKV*

In the above sequence, the plain text denotes an adenosine deaminase sequence, bold sequence indicates sequence derived from Cas9, the italics sequence denotes a linker sequence, and the underlined sequence denotes a bipartite nuclear localization sequence.

[0607] In some embodiments, the base editor is ABE8.1, which comprises or consists essentially of the following sequence or a fragment thereof having adenosine deaminase activity:

pNMG-B335 ABE8.1_Y147T_CP5_NGCPAM_monomer:
MSEVEFSHEYWMRHALTLAKRARDEREVPVGAVLVLNNRVIGEGWNRAIG
LHDPTAHAEIMALRQGGLVMQNYRLIDATLYVTFEPCVMCAGAMIHSRIG
RVVFGVRNAKTGAAGSLMDVLHYPGMNHRVEITEGILADECAALLCTFFR
MPRQVFNAQKKAQSSTDSGGSSGGSSGSETPGTSESATPESSGGSSGGSE
IGKATAKYFFYSNIMNFFKTEITLANGEIRKRPLIETNGETGEIVWDKGR
DFATVRKVLSMPQVNIVKKTEVQTGGFSKESILPKRNSDKLIARKKDWDP
KKYGGFMQPTVAYSVLVVAKVEKGKSKKLKSVKELLGITIMERSSFEKNP
IDFLEAKGYKEVKKDLIIKLPKYSLFELENGRKRMLASAKFLQKGNELAL
PSKYVNFLYLASHYEKLKGSPEDNEQKQLFVEQHKHYLDEIIEQISEFSK
RVILADANLDKVLSAYNKHRDKPIREQAENIIHLFTLTNLGAPRAFKYFD
TTIARKEYRSTKEVLDATLIHQSITGLYETRIDLSQLGGDGGSGGSGGSG
GSGGSGGSGGMDKKYSIGLAIGTNSVGWAVITDEYKVPSKKFKVLGNTDR
HSIKKNLIGALLFDSGETAEATRLKRTARRRYTRRKNRICYLQEIFSNEM
AKVDDSFFHRLEESFLVEEDKKHERHPIFGNIVDEVAYHEKYPTIYHLRK
KLVDSTDKADLRLIYLALAHMIKFRGHFLIEGDLNPDNSDVDKLFIQLVQ
TYNQLFEENPINASGVDAKAILSARLSKSRRLENLIAQLPGEKKNGLFGN
LIALSLGLTPNFKSNFDLAEDAKLQLSKDTYDDDLDNLLAQIGDQYADLF
LAAKNLSDAILLSDILRVNTEITKAPLSASMIKRYDEHHQDLTLLKALVR
QQLPEKYKEIFFDQSKNGYAGYIDGGASQEEFYKFIKPILEKMDGTEELL
VKLNREDLLRKQRTFDNGSIPHQIHLGELHAILRRQEDFYPFLKDNREKI
EKILTFRIPYYVGPLARGNSRFAWMTRKSEETITPWNFEEVVDKGASAQS
FIERMTNFDKNLPNEKVLPKHSLLYEYFTVYNELTKVKYVTEGMRKPAFL
SGEQKKAIVDLLFKTNRKVTVKQLKEDYFKKIECFDSVEISGVEDRFNAS
LGTYHDLLKIIKDKDFLDNEENEDILEDIVLTLTLFEDREMIEERLKTYA
HLFDDKVMKQLKRRRYTGWGRLSRKLINGIRDKQSGKTILDFLKSDGFAN
RNFMQLIHDDSLTFKEDIQKAQVSGQGDSLHEHIANLAGSPAIKKGILQT
VKVVDELVKVMGRHKPENIVIEMARENQTTQKGQKNSRERMKRIEEGIKE
LGSQILKEHPVENTQLQNEKLYLYYLQNGRDMYVDQELDINRLSDYDVDH
IVPQSFLKDDSIDNKVLTRSDKNRGKSDNVPSEEVVKKMKNYWRQLLNAK
LITQRKFDNLTKAERGGLSELDKAGFIKRQLVETRQITKHVAQILDSRMN
TKYDENDKLIREVKVITLKSKLVSDFRKDFQFYKVREINNYHHAHDAYLN
AVVGTALIKKYPKLESEFVYGDYKVYDVRKMIAKSEQEGADKRTADGSEF
ESPKKKRKV*

In the above sequence, the plain text denotes an adenosine deaminase sequence, bold sequence indicates sequence derived from Cas9, the italics sequence denotes a linker sequence, and the underlined sequence denotes a bipartite nuclear localization sequence.

[0608] In some embodiments, the base editor is ABE8.14, which comprises or consists essentially of the following sequence or a fragment thereof having adenosine deaminase activity:

pNMG-357_ABE8.14 with NGC PAM CP5
MSEVEFSHEYWMRHALTLAKRAWDEREVPVGAVLVHNNRVIGEGWNRPIG
RHDPTAHAEIMALRQGGLVMQNYRLIDATLYVTLEPCVMCAGAMIHSRIG
RVVFGARDAKTGAAGSLMDVLHHPGMNHRVEITEGILADECAALLSDFFR
MRRQEIKAQKKAQSSTDGGSSGGSSGSETPGTSESATPESSGGSSGGSMS
EVEFSHEYWMRHALTLAKRARDEREVPVGAVLVLNNRVIGEGWNRAIGLH
DPTAHAEIMALRQGGLVMQNYRLIDATLYVTFEPCVMCAGAMIHSRIGRV
VFGVRNAKTGAAGSLMDVLHYPGMNHRVEITEGILADECAALLCTFFRMP
RQVFNAQKKAQSSTDSGGSSGGSSGSETPGTSESATPESSGGSSGGSEIG
KATAKYFFYSNIMNFFKTEITLANGEIRKRPLIETNGETGEIVWDKGRDF
ATVRKVLSMPQVNIVKKTEVQTGGFSKESILPKRNSDKLIARKKDWDPKK
YGGFMQPTVAYSVLVVAKVEKGKSKKLKSVKELLGITIMERSSFEKNPID
FLEAKGYKEVKKDLIIKLPKYSLFELENGRKRMLASAKFLQKGNELALPS
KYVNFLYLASHYEKLKGSPEDNEQKQLFVEQHKHYLDEIIEQISEFSKRV
ILADANLDKVLSAYNKHRDKPIREQAENIIHLFTLTNLGAPRAFKYFDTT
IARKEYRSTKEVLDATLIHQSITGLYETRIDLSQLGGDGGSGGSGGSGGS
GGSGGSGGMDKKYSIGLAIGTNSVGWAVITDEYKVPSKKFKVLGNTDRHS
IKKNLIGALLFDSGETAEATRLKRTARRRYTRRKNRICYLQEIFSNEMAK
VDDSFFHRLEESFLVEEDKKHERHPIFGNIVDEVAYHEKYPTIYHLRKKL
VDSTDKADLRLIYLALAHMIKFRGHFLIEGDLNPDNSDVDKLFIQLVQTY
NQLFEENPINASGVDAKAILSARLSKSRRLENLIAQLPGEKKNGLFGNLI
ALSLGLTPNFKSNFDLAEDAKLQLSKDTYDDDLDNLLAQIGDQYADLFLA
AKNLSDAILLSDILRVNTEITKAPLSASMIKRYDEHHQDLTLLKALVRQQ
LPEKYKEIFFDQSKNGYAGYIDGGASQEEFYKFIKPILEKMDGTEELLVK
LNREDLLRKQRTFDNGSIPHQIHLGELHAILRRQEDFYPFLKDNREKIEK
ILTFRIPYYVGPLARGNSRFAWMTRKSEETITPWNFEEVVDKGASAQSFI
ERMTNFDKNLPNEKVLPKHSLLYEYFTVYNELTKVKYVTEGMRKPAFLSG
EQKKAIVDLLFKTNRKVTVKQLKEDYFKKIECFDSVEISGVEDRFNASLG
TYHDLLKIIKDKDFLDNEENEDILEDIVLTLTLFEDREMIEERLKTYAHL
FDDKVMKQLKRRRYTGWGRLSRKLINGIRDKQSGKTILDFLKSDGFANRN
FMQLIHDDSLTFKEDIQKAQVSGQGDSLHEHIANLAGSPAIKKGILQTVK
VVDELVKVMGRHKPENIVIEMARENQTTQKGQKNSRERMKRIEEGIKELG
SQILKEHPVENTQLQNEKLYLYYLQNGRDMYVDQELDINRLSDYDVDHIV
PQSFLKDDSIDNKVLTRSDKNRGKSDNVPSEEVVKKMKNYWRQLLNAKLI
TQRKFDNLTKAERGGLSELDKAGFIKRQLVETRQITKHVAQILDSRMNTK
YDENDKLIREVKVITLKSKLVSDFRKDFQFYKVREINNYHHAHDAYLNAV
VGTALIKKYPKLESEFVYGDYKVYDVRKMIAKSEQEGADKRTADGSEFES
PKKKRKV*

In the above sequence, the plain text denotes an adenosine deaminase sequence, bold sequence indicates sequence derived from Cas9, the italics sequence denotes a linker sequence, and the underlined sequence denotes a bipartite nuclear localization sequence.

[0609] In some embodiments, an ABE8 of the invention is selected from the following sequences:

01. monoABE8.1_bpNLS + Y147T
MSEVEFSHEYWMRHALTLAKRARDEREVPVGAVLVLNNRVIGEGWNRAIGLHDPTAHAEIMA
LRQGGLVMQNYRLIDATLYVTFEPCVMCAGAMIHSRIGRVVFGVRNAKTGAAGSLMDVLHYP
GMNHRVEITEGILADECAALLCIFFRMPRQVFNAQKKAQSSIDSGGSSGGSSGSETPGISES
ATPESSGGSSGGSDKKYSIGLAIGTNSVGWAVITDEYKVPSKKFKVLGNTDRHSIKKNLIGA
LLFDSGETAEATRLKRTARRRYTRRKNRICYLQEIFSNEMAKVDDSFFHRLEESFLVEEDKK
HERHPIEGNIVDEVAYHEKYPTIYHLRKKLVDSTDKADLRLIYLALAHMIKERGHFLIEGDL
NPDNSDVDKLFIQLVQTYNQLFEENPINASGVDAKAILSARLSKSRRLENLIAQLPGEKKNG
LFGNLIALSLGLIPNEKSNFDLAEDAKLQLSKDTYDDDLDNLLAQIGDQYADLFLAAKNLSD
AILLSDILRVNTEITKAPLSASMIKRYDEHHQDLILLKALVRQQLPEKYKEIFFDQSKNGYA
GYIDGGASQEEFYKFIKPILEKMDGTEELLVKLNREDLLRKQRTFDNGSIPHQIHLGELHAI
LRRQEDFYPFLKDNREKIEKILTFRIPYYVGPLARGNSRFAWMTRKSEETITPWNFEEVVDK
GASAQSFIERMINFDKNLPNEKVLPKHSLLYEYFTVYNELTKVKYVTEGMRKPAFLSGEQKK
AIVDLLFKINRKVIVKQLKEDYFKKIECFDSVEISGVEDRFNASLGTYHDLLKIIKDKDFLD
NEENEDILEDIVLILTLFEDREMIEERLKTYAHLFDDKVMKQLKRRRYTGWGRLSRKLINGI
RDKQSGKTILDFLKSDGFANRNFMQLIHDDSLIFKEDIQKAQVSGQGDSLHEHIANLAGSPA
IKKGILQTVKVVDELVKVMGRHKPENIVIEMARENQTTQKGQKNSRERMKRIEEGIKELGSQ
ILKEHPVENTQLQNEKLYLYYLQNGRDMYVDQELDINRLSDYDVDHIVPQSFLKDDSIDNKV
LIRSDKNRGKSDNVPSEEVVKKMKNYWRQLLNAKLITQRKEDNLIKAERGGLSELDKAGFIK
RQLVETRQIIKHVAQILDSRMNIKYDENDKLIREVKVITLKSKLVSDFRKDFQFYKVREINN
YHHAHDAYLNAVVGIALIKKYPKLESEFVYGDYKVYDVRKMIAKSEQEIGKATAKYFFYSNI
MNFFKTEITLANGEIRKRPLIETNGETGEIVWDKGRDFATVRKVLSMPQVNIVKKTEVQTGG
FSKESILPKRNSDKLIARKKDWDPKKYGGFVSPIVAYSVLVVAKVEKGKSKKLKSVKELLGI
TIMERSSFEKNPIDFLEAKGYKEVKKDLIIKLPKYSLFELENGRKRMLASARELQKGNELAL
PSKYVNFLYLASHYEKLKGSPEDNEQKQLFVEQHKHYLDEIIEQISEFSKRVILADANLDKV
LSAYNKHRDKPIREQAENIIHLFTLINLGAPAAFKYFDTTIDRKQYRSTKEVLDATLIHQSI
TGLYETRIDLSQLGGDEGADKRTADGSEFESPKKKRKV
02. monoABE8.1_bpNLS + Y147R
MSEVEFSHEYWMRHALTLAKRARDEREVPVGAVLVLNNRVIGEGWNRAIGLHDPTAHAEIMA
LRQGGLVMQNYRLIDATLYVTFEPCVMCAGAMIHSRIGRVVFGVRNAKTGAAGSLMDVLHYP
GMNHRVEITEGILADECAALLCRFERMPRQVFNAQKKAQSSIDSGGSSGGSSGSETPGISES
ATPESSGGSSGGSDKKYSIGLAIGINSVGWAVITDEYKVPSKKFKVLGNIDRHSIKKNLIGA
LLFDSGETAEATRLKRTARRRYTRRKNRICYLQEIFSNEMAKVDDSFFHRLEESFLVEEDKK
HERHPIEGNIVDEVAYHEKYPTIYHLRKKLVDSTDKADLRLIYLALAHMIKERGHFLIEGDL
NPDNSDVDKLFIQLVQTYNQLFEENPINASGVDAKAILSARLSKSRRLENLIAQLPGEKKNG
LFGNLIALSLGLIPNEKSNFDLAEDAKLQLSKDTYDDDLDNLLAQIGDQYADLFLAAKNLSD
AILLSDILRVNTEITKAPLSASMIKRYDEHHQDLILLKALVRQQLPEKYKEIFFDQSKNGYA
GYIDGGASQEEFYKFIKPILEKMDGTEELLVKLNREDLLRKQRTFDNGSIPHQIHLGELHAI
LRRQEDFYPFLKDNREKIEKILTFRIPYYVGPLARGNSRFAWMTRKSEETITPWNFEEVVDK
GASAQSFIERMINFDKNLPNEKVLPKHSLLYEYFTVYNELTKVKYVTEGMRKPAFLSGEQKK
AIVDLLFKINRKVIVKQLKEDYFKKIECFDSVEISGVEDRFNASLGTYHDLLKIIKDKDFLD
NEENEDILEDIVLILTLFEDREMIEERLKTYAHLFDDKVMKQLKRRRYTGWGRLSRKLINGI
RDKQSGKTILDFLKSDGFANRNFMQLIHDDSLIFKEDIQKAQVSGQGDSLHEHIANLAGSPA
IKKGILQTVKVVDELVKVMGRHKPENIVIEMARENQTTQKGQKNSRERMKRIEEGIKELGSQ
ILKEHPVENTQLQNEKLYLYYLQNGRDMYVDQELDINRLSDYDVDHIVPQSFLKDDSIDNKV
LIRSDKNRGKSDNVPSEEVVKKMKNYWRQLLNAKLITQRKEDNLIKAERGGLSELDKAGFIK
RQLVETRQIIKHVAQILDSRMNIKYDENDKLIREVKVITLKSKLVSDFRKDFQFYKVREINN
YHHAHDAYLNAVVGIALIKKYPKLESEFVYGDYKVYDVRKMIAKSEQEIGKATAKYFFYSNI
MNFFKTEITLANGEIRKRPLIETNGETGEIVWDKGRDFATVRKVLSMPQVNIVKKTEVQTGG
FSKESILPKRNSDKLIARKKDWDPKKYGGFVSPIVAYSVLVVAKVEKGKSKKLKSVKELLGI
TIMERSSFEKNPIDFLEAKGYKEVKKDLIIKLPKYSLFELENGRKRMLASARELQKGNELAL
PSKYVNFLYLASHYEKLKGSPEDNEQKQLFVEQHKHYLDEIIEQISEFSKRVILADANLDKV
LSAYNKHRDKPIREQAENIIHLFTLINLGAPAAFKYFDTTIDRKQYRSTKEVLDATLIHQSI
TGLYETRIDLSQLGGDEGADKRTADGSEFESPKKKRKV
03. monoABE8.1_bpNLS + Q154S
MSEVEFSHEYWMRHALTLAKRARDEREVPVGAVLVLNNRVIGEGWNRAIGLHDPTAHAEIMA
LRQGGLVMQNYRLIDATLYVTFEPCVMCAGAMIHSRIGRVVFGVRNAKTGAAGSLMDVLHYP
GMNHRVEITEGILADECAALLCYFFRMPRSVFNAQKKAQSSIDSGGSSGGSSGSETPGISES
ATPESSGGSSGGSDKKYSIGLAIGINSVGWAVITDEYKVPSKKFKVLGNIDRHSIKKNLIGA
LLFDSGETAEATRLKRTARRRYTRRKNRICYLQEIFSNEMAKVDDSFFHRLEESFLVEEDKK
HERHPIEGNIVDEVAYHEKYPTIYHLRKKLVDSTDKADLRLIYLALAHMIKERGHFLIEGDL
NPDNSDVDKLFIQLVQTYNQLFEENPINASGVDAKAILSARLSKSRRLENLIAQLPGEKKNG
LFGNLIALSLGLIPNEKSNFDLAEDAKLQLSKDTYDDDLDNLLAQIGDQYADLFLAAKNLSD
AILLSDILRVNTEITKAPLSASMIKRYDEHHQDLILLKALVRQQLPEKYKEIFFDQSKNGYA
GYIDGGASQEEFYKFIKPILEKMDGTEELLVKLNREDLLRKQRTFDNGSIPHQIHLGELHAI
LRRQEDFYPFLKDNREKIEKILTFRIPYYVGPLARGNSRFAWMTRKSEETITPWNFEEVVDK
GASAQSFIERMINFDKNLPNEKVLPKHSLLYEYFTVYNELTKVKYVTEGMRKPAFLSGEQKK
AIVDLLFKINRKVIVKQLKEDYFKKIECFDSVEISGVEDRFNASLGTYHDLLKIIKDKDFLD
NEENEDILEDIVLILTLFEDREMIEERLKTYAHLFDDKVMKQLKRRRYTGWGRLSRKLINGI
RDKQSGKTILDFLKSDGFANRNFMQLIHDDSLIFKEDIQKAQVSGQGDSLHEHIANLAGSPA
IKKGILQTVKVVDELVKVMGRHKPENIVIEMARENQTTQKGQKNSRERMKRIEEGIKELGSQ
ILKEHPVENTQLQNEKLYLYYLQNGRDMYVDQELDINRLSDYDVDHIVPQSFLKDDSIDNKV
LIRSDKNRGKSDNVPSEEVVKKMKNYWRQLLNAKLITQRKEDNLIKAERGGLSELDKAGFIK
RQLVETRQIIKHVAQILDSRMNIKYDENDKLIREVKVITLKSKLVSDFRKDFQFYKVREINN
YHHAHDAYLNAVVGIALIKKYPKLESEFVYGDYKVYDVRKMIAKSEQEIGKATAKYFFYSNI
MNFFKTEITLANGEIRKRPLIETNGETGEIVWDKGRDFATVRKVLSMPQVNIVKKTEVQTGG
FSKESILPKRNSDKLIARKKDWDPKKYGGFVSPIVAYSVLVVAKVEKGKSKKLKSVKELLGI
TIMERSSFEKNPIDFLEAKGYKEVKKDLIIKLPKYSLFELENGRKRMLASARELQKGNELAL
PSKYVNFLYLASHYEKLKGSPEDNEQKQLFVEQHKHYLDEIIEQISEFSKRVILADANLDKV
LSAYNKHRDKPIREQAENIIHLFTLINLGAPAAFKYFDTTIDRKQYRSTKEVLDATLIHQSI
TGLYETRIDLSQLGGDEGADKRTADGSEFESPKKKRKV
04. monoABE8.1_bpNLS + Y123H
MSEVEFSHEYWMRHALTLAKRARDEREVPVGAVLVLNNRVIGEGWNRAIGLHDPTAHAEIMA
LRQGGLVMQNYRLIDATLYVTFEPCVMCAGAMIHSRIGRVVFGVRNAKTGAAGSLMDVLHHP
GMNHRVEITEGILADECAALLCYFFRMPRQVFNAQKKAQSSIDSGGSSGGSSGSETPGISES
ATPESSGGSSGGSDKKYSIGLAIGINSVGWAVITDEYKVPSKKFKVLGNIDRHSIKKNLIGA
LLFDSGETAEATRLKRTARRRYTRRKNRICYLQEIFSNEMAKVDDSFFHRLEESFLVEEDKK
HERHPIFGNIVDEVAYHEKYPTIYHLRKKLVDSTDKADLRLIYLALAHMIKFRGHFLIEGDL
NPDNSDVDKLFIQLVQTYNQLFEENPINASGVDAKAILSARLSKSRRLENLIAQLPGEKKNG
LFGNLIALSLGLIPNEKSNFDLAEDAKLQLSKDTYDDDLDNLLAQIGDQYADLFLAAKNLSD
AILLSDILRVNTEITKAPLSASMIKRYDEHHQDLILLKALVRQQLPEKYKEIFFDQSKNGYA
GYIDGGASQEEFYKFIKPILEKMDGTEELLVKLNREDLLRKQRTFDNGSIPHQIHLGELHAI
LRRQEDFYPFLKDNREKIEKILTFRIPYYVGPLARGNSRFAWMTRKSEETITPWNFEEVVDK
GASAQSFIERMINFDKNLPNEKVLPKHSLLYEYFTVYNELTKVKYVTEGMRKPAFLSGEQKK
AIVDLLFKINRKVIVKQLKEDYFKKIECFDSVEISGVEDRFNASLGTYHDLLKIIKDKDFLD
NEENEDILEDIVLILTLFEDREMIEERLKTYAHLFDDKVMKQLKRRRYTGWGRLSRKLINGI
RDKQSGKTILDFLKSDGFANRNFMQLIHDDSLIFKEDIQKAQVSGQGDSLHEHIANLAGSPA
IKKGILQTVKVVDELVKVMGRHKPENIVIEMARENQTTQKGQKNSRERMKRIEEGIKELGSQ
ILKEHPVENTQLQNEKLYLYYLQNGRDMYVDQELDINRLSDYDVDHIVPQSFLKDDSIDNKV
LIRSDKNRGKSDNVPSEEVVKKMKNYWRQLLNAKLITQRKEDNLIKAERGGLSELDKAGFIK
RQLVETRQIIKHVAQILDSRMNIKYDENDKLIREVKVITLKSKLVSDFRKDFQFYKVREINN
YHHAHDAYLNAVVGIALIKKYPKLESEFVYGDYKVYDVRKMIAKSEQEIGKATAKYFFYSNI
MNFFKTEITLANGEIRKRPLIETNGETGEIVWDKGRDFATVRKVLSMPQVNIVKKTEVQTGG
FSKESILPKRNSDKLIARKKDWDPKKYGGFVSPIVAYSVLVVAKVEKGKSKKLKSVKELLGI
TIMERSSFEKNPIDFLEAKGYKEVKKDLIIKLPKYSLFELENGRKRMLASARELQKGNELAL
PSKYVNFLYLASHYEKLKGSPEDNEQKQLFVEQHKHYLDEIIEQISEFSKRVILADANLDKV
LSAYNKHRDKPIREQAENIIHLFTLINLGAPAAFKYFDTTIDRKQYRSTKEVLDATLIHQSI
TGLYETRIDLSQLGGDEGADKRTADGSEFESPKKKRKV
05. monoABE8.1_bpNLS + V82S
MSEVEFSHEYWMRHALTLAKRARDEREVPVGAVLVLNNRVIGEGWNRAIGLHDPTAHAEIMA
LRQGGLVMQNYRLIDATLYSTFEPCVMCAGAMIHSRIGRVVFGVRNAKTGAAGSLMDVLHYP
GMNHRVEITEGILADECAALLCYFFRMPRQVFNAQKKAQSSIDSGGSSGGSSGSETPGISES
ATPESSGGSSGGSDKKYSIGLAIGINSVGWAVITDEYKVPSKKFKVLGNIDRHSIKKNLIGA
LLFDSGETAEATRLKRTARRRYTRRKNRICYLQEIFSNEMAKVDDSFFHRLEESFLVEEDKK
HERHPIEGNIVDEVAYHEKYPTIYHLRKKLVDSTDKADLRLIYLALAHMIKERGHFLIEGDL
NPDNSDVDKLFIQLVQTYNQLFEENPINASGVDAKAILSARLSKSRRLENLIAQLPGEKKNG
LFGNLIALSLGLIPNEKSNFDLAEDAKLQLSKDTYDDDLDNLLAQIGDQYADLFLAAKNLSD
AILLSDILRVNTEITKAPLSASMIKRYDEHHQDLILLKALVRQQLPEKYKEIFFDQSKNGYA
GYIDGGASQEEFYKFIKPILEKMDGTEELLVKLNREDLLRKQRTFDNGSIPHQIHLGELHAI
LRRQEDFYPFLKDNREKIEKILTFRIPYYVGPLARGNSRFAWMTRKSEETITPWNFEEVVDK
GASAQSFIERMINFDKNLPNEKVLPKHSLLYEYFTVYNELTKVKYVTEGMRKPAFLSGEQKK
AIVDLLFKINRKVIVKQLKEDYFKKIECFDSVEISGVEDRFNASLGTYHDLLKIIKDKDFLD
NEENEDILEDIVLILTLFEDREMIEERLKTYAHLFDDKVMKQLKRRRYTGWGRLSRKLINGI
RDKQSGKTILDFLKSDGFANRNFMQLIHDDSLIFKEDIQKAQVSGQGDSLHEHIANLAGSPA
IKKGILQTVKVVDELVKVMGRHKPENIVIEMARENQTTQKGQKNSRERMKRIEEGIKELGSQ
ILKEHPVENTQLQNEKLYLYYLQNGRDMYVDQELDINRLSDYDVDHIVPQSFLKDDSIDNKV
LIRSDKNRGKSDNVPSEEVVKKMKNYWRQLLNAKLITQRKEDNLIKAERGGLSELDKAGFIK
RQLVETRQIIKHVAQILDSRMNIKYDENDKLIREVKVITLKSKLVSDFRKDFQFYKVREINN
YHHAHDAYLNAVVGIALIKKYPKLESEFVYGDYKVYDVRKMIAKSEQEIGKATAKYFFYSNI
MNFFKTEITLANGEIRKRPLIETNGETGEIVWDKGRDFATVRKVLSMPQVNIVKKTEVQTGG
FSKESILPKRNSDKLIARKKDWDPKKYGGFVSPIVAYSVLVVAKVEKGKSKKLKSVKELLGI
TIMERSSFEKNPIDFLEAKGYKEVKKDLIIKLPKYSLFELENGRKRMLASARELQKGNELAL
PSKYVNFLYLASHYEKLKGSPEDNEQKQLFVEQHKHYLDEIIEQISEFSKRVILADANLDKV
LSAYNKHRDKPIREQAENIIHLFTLINLGAPAAFKYFDTTIDRKQYRSTKEVLDATLIHQSI
TGLYETRIDLSQLGGDEGADKRTADGSEFESPKKKRKV
6. monoABE8.1_bpNLS + T166R
MSEVEFSHEYWMRHALTLAKRARDEREVPVGAVLVLNNRVIGEGWNRAIGLHDPTAHAEIMA
LRQGGLVMQNYRLIDATLYVTFEPCVMCAGAMIHSRIGRVVFGVRNAKTGAAGSLMDVLHYP
GMNHRVEITEGILADECAALLCYFFRMPRQVFNAQKKAQSSRDSGGSSGGSSGSETPGISES
ATPESSGGSSGGSDKKYSIGLAIGINSVGWAVITDEYKVPSKKFKVLGNIDRHSIKKNLIGA
LLFDSGETAEATRLKRTARRRYTRRKNRICYLQEIFSNEMAKVDDSFFHRLEESFLVEEDKK
HERHPIEGNIVDEVAYHEKYPTIYHLRKKLVDSTDKADLRLIYLALAHMIKERGHFLIEGDL
NPDNSDVDKLFIQLVQTYNQLFEENPINASGVDAKAILSARLSKSRRLENLIAQLPGEKKNG
LFGNLIALSLGLIPNEKSNFDLAEDAKLQLSKDTYDDDLDNLLAQIGDQYADLFLAAKNLSD
AILLSDILRVNTEITKAPLSASMIKRYDEHHQDLILLKALVRQQLPEKYKEIFFDQSKNGYA
GYIDGGASQEEFYKFIKPILEKMDGTEELLVKLNREDLLRKQRTFDNGSIPHQIHLGELHAI
LRRQEDFYPFLKDNREKIEKILTFRIPYYVGPLARGNSRFAWMTRKSEETITPWNFEEVVDK
GASAQSFIERMINFDKNLPNEKVLPKHSLLYEYFTVYNELTKVKYVTEGMRKPAFLSGEQKK
AIVDLLFKINRKVIVKQLKEDYFKKIECFDSVEISGVEDRFNASLGTYHDLLKIIKDKDFLD
NEENEDILEDIVLILTLFEDREMIEERLKTYAHLFDDKVMKQLKRRRYTGWGRLSRKLINGI
RDKQSGKTILDFLKSDGFANRNFMQLIHDDSLIFKEDIQKAQVSGQGDSLHEHIANLAGSPA
IKKGILQTVKVVDELVKVMGRHKPENIVIEMARENQTTQKGQKNSRERMKRIEEGIKELGSQ
ILKEHPVENTQLQNEKLYLYYLQNGRDMYVDQELDINRLSDYDVDHIVPQSFLKDDSIDNKV
LIRSDKNRGKSDNVPSEEVVKKMKNYWRQLLNAKLITQRKEDNLIKAERGGLSELDKAGFIK
RQLVETRQIIKHVAQILDSRMNIKYDENDKLIREVKVITLKSKLVSDFRKDFQFYKVREINN
YHHAHDAYLNAVVGIALIKKYPKLESEFVYGDYKVYDVRKMIAKSEQEIGKATAKYFFYSNI
MNFFKTEITLANGEIRKRPLIETNGETGEIVWDKGRDFATVRKVLSMPQVNIVKKTEVQTGG
FSKESILPKRNSDKLIARKKDWDPKKYGGFVSPIVAYSVLVVAKVEKGKSKKLKSVKELLGI
TIMERSSFEKNPIDFLEAKGYKEVKKDLIIKLPKYSLFELENGRKRMLASARELQKGNELAL
PSKYVNFLYLASHYEKLKGSPEDNEQKQLFVEQHKHYLDEIIEQISEFSKRVILADANLDKV
LSAYNKHRDKPIREQAENIIHLFTLINLGAPAAFKYFDTTIDRKQYRSTKEVLDATLIHQSI
TGLYETRIDLSQLGGDEGADKRTADGSEFESPKKKRKV
7. monoABE8.1_bpNLS + Q154R
MSEVEFSHEYWMRHALTLAKRARDEREVPVGAVLVLNNRVIGEGWNRAIGLHDPTAHAEIMA
LRQGGLVMQNYRLIDATLYVTFEPCVMCAGAMIHSRIGRVVFGVRNAKTGAAGSLMDVLHYP
GMNHRVEITEGILADECAALLCYFFRMPRRVFNAQKKAQSSIDSGGSSGGSSGSETPGISES
ATPESSGGSSGGSDKKYSIGLAIGINSVGWAVITDEYKVPSKKFKVLGNIDRHSIKKNLIGA
LLFDSGETAEATRLKRTARRRYTRRKNRICYLQEIFSNEMAKVDDSFFHRLEESFLVEEDKK
HERHPIEGNIVDEVAYHEKYPTIYHLRKKLVDSTDKADLRLIYLALAHMIKERGHFLIEGDL
NPDNSDVDKLFIQLVQTYNQLFEENPINASGVDAKAILSARLSKSRRLENLIAQLPGEKKNG
LFGNLIALSLGLIPNEKSNFDLAEDAKLQLSKDTYDDDLDNLLAQIGDQYADLFLAAKNLSD
AILLSDILRVNTEITKAPLSASMIKRYDEHHQDLILLKALVRQQLPEKYKEIFFDQSKNGYA
GYIDGGASQEEFYKFIKPILEKMDGTEELLVKLNREDLLRKQRTFDNGSIPHQIHLGELHAI
LRRQEDFYPFLKDNREKIEKILTFRIPYYVGPLARGNSRFAWMTRKSEETITPWNFEEVVDK
GASAQSFIERMINFDKNLPNEKVLPKHSLLYEYFTVYNELTKVKYVTEGMRKPAFLSGEQKK
AIVDLLFKINRKVIVKQLKEDYFKKIECFDSVEISGVEDRFNASLGTYHDLLKIIKDKDFLD
NEENEDILEDIVLILTLFEDREMIEERLKTYAHLFDDKVMKQLKRRRYTGWGRLSRKLINGI
RDKQSGKTILDFLKSDGFANRNFMQLIHDDSLIFKEDIQKAQVSGQGDSLHEHIANLAGSPA
IKKGILQTVKVVDELVKVMGRHKPENIVIEMARENQTTQKGQKNSRERMKRIEEGIKELGSQ
ILKEHPVENTQLQNEKLYLYYLQNGRDMYVDQELDINRLSDYDVDHIVPQSFLKDDSIDNKV
LIRSDKNRGKSDNVPSEEVVKKMKNYWRQLLNAKLITQRKEDNLIKAERGGLSELDKAGFIK
RQLVETRQIIKHVAQILDSRMNIKYDENDKLIREVKVITLKSKLVSDFRKDFQFYKVREINN
YHHAHDAYLNAVVGIALIKKYPKLESEFVYGDYKVYDVRKMIAKSEQEIGKATAKYFFYSNI
MNFFKTEITLANGEIRKRPLIETNGETGEIVWDKGRDFATVRKVLSMPQVNIVKKTEVQTGG
FSKESILPKRNSDKLIARKKDWDPKKYGGFVSPIVAYSVLVVAKVEKGKSKKLKSVKELLGI
TIMERSSFEKNPIDFLEAKGYKEVKKDLIIKLPKYSLFELENGRKRMLASARELQKGNELAL
PSKYVNFLYLASHYEKLKGSPEDNEQKQLFVEQHKHYLDEIIEQISEFSKRVILADANLDKV
LSAYNKHRDKPIREQAENIIHLFTLINLGAPAAFKYFDTTIDRKQYRSTKEVLDATLIHQSI
TGLYETRIDLSQLGGDEGADKRTADGSEFESPKKKRKV
08. monoABE8.1_bpNLS + Y147R_Q154R_Y123H
MSEVEFSHEYWMRHALTLAKRARDEREVPVGAVLVLNNRVIGEGWNRAIGLHDPTAHAEIMA
LRQGGLVMQNYRLIDATLYVTFEPCVMCAGAMIHSRIGRVVFGVRNAKTGAAGSLMDVLHHP
GMNHRVEITEGILADECAALLCRFERMPRRVFNAQKKAQSSIDSGGSSGGSSGSETPGISES
ATPESSGGSSGGSDKKYSIGLAIGINSVGWAVITDEYKVPSKKFKVLGNIDRHSIKKNLIGA
LLFDSGETAEATRLKRTARRRYTRRKNRICYLQEIFSNEMAKVDDSFFHRLEESFLVEEDKK
HERHPIEGNIVDEVAYHEKYPTIYHLRKKLVDSTDKADLRLIYLALAHMIKERGHFLIEGDL
NPDNSDVDKLFIQLVQTYNQLFEENPINASGVDAKAILSARLSKSRRLENLIAQLPGEKKNG
LFGNLIALSLGLIPNEKSNFDLAEDAKLQLSKDTYDDDLDNLLAQIGDQYADLFLAAKNLSD
AILLSDILRVNTEITKAPLSASMIKRYDEHHQDLILLKALVRQQLPEKYKEIFFDQSKNGYA
GYIDGGASQEEFYKFIKPILEKMDGTEELLVKLNREDLLRKQRTFDNGSIPHQIHLGELHAI
LRRQEDFYPFLKDNREKIEKILTFRIPYYVGPLARGNSRFAWMTRKSEETITPWNFEEVVDK
GASAQSFIERMINFDKNLPNEKVLPKHSLLYEYFTVYNELTKVKYVTEGMRKPAFLSGEQKK
AIVDLLFKINRKVIVKQLKEDYFKKIECFDSVEISGVEDRFNASLGTYHDLLKIIKDKDFLD
NEENEDILEDIVLILTLFEDREMIEERLKTYAHLFDDKVMKQLKRRRYTGWGRLSRKLINGI
RDKQSGKTILDFLKSDGFANRNFMQLIHDDSLIFKEDIQKAQVSGQGDSLHEHIANLAGSPA
IKKGILQTVKVVDELVKVMGRHKPENIVIEMARENQTTQKGQKNSRERMKRIEEGIKELGSQ
ILKEHPVENTQLQNEKLYLYYLQNGRDMYVDQELDINRLSDYDVDHIVPQSFLKDDSIDNKV
LIRSDKNRGKSDNVPSEEVVKKMKNYWRQLLNAKLITQRKEDNLIKAERGGLSELDKAGFIK
RQLVETRQIIKHVAQILDSRMNIKYDENDKLIREVKVITLKSKLVSDFRKDFQFYKVREINN
YHHAHDAYLNAVVGIALIKKYPKLESEFVYGDYKVYDVRKMIAKSEQEIGKATAKYFFYSNI
MNFFKTEITLANGEIRKRPLIETNGETGEIVWDKGRDFATVRKVLSMPQVNIVKKTEVQTGG
FSKESILPKRNSDKLIARKKDWDPKKYGGFVSPIVAYSVLVVAKVEKGKSKKLKSVKELLGI
TIMERSSFEKNPIDFLEAKGYKEVKKDLIIKLPKYSLFELENGRKRMLASARELQKGNELAL
PSKYVNFLYLASHYEKLKGSPEDNEQKQLFVEQHKHYLDEIIEQISEFSKRVILADANLDKV
LSAYNKHRDKPIREQAENIIHLFTLINLGAPAAFKYFDTTIDRKQYRSTKEVLDATLIHQSI
TGLYETRIDLSQLGGDEGADKRTADGSEFESPKKKRKV
09. monoABE8.1_bpNLS + Y147R_Q154R_I76Y
MSEVEFSHEYWMRHALTLAKRARDEREVPVGAVLVLNNRVIGEGWNRAIGLHDPTAHAEIMA
LRQGGLVMQNYRLYDATLYVTFEPCVMCAGAMIHSRIGRVVFGVRNAKTGAAGSLMDVLHYP
GMNHRVEITEGILADECAALLCRFERMPRRVFNAQKKAQSSIDSGGSSGGSSGSETPGISES
ATPESSGGSSGGSDKKYSIGLAIGINSVGWAVITDEYKVPSKKFKVLGNIDRHSIKKNLIGA
LLFDSGETAEATRLKRTARRRYTRRKNRICYLQEIFSNEMAKVDDSFFHRLEESFLVEEDKK
HERHPIEGNIVDEVAYHEKYPTIYHLRKKLVDSTDKADLRLIYLALAHMIKERGHFLIEGDL
NPDNSDVDKLFIQLVQTYNQLFEENPINASGVDAKAILSARLSKSRRLENLIAQLPGEKKNG
LFGNLIALSLGLIPNEKSNFDLAEDAKLQLSKDTYDDDLDNLLAQIGDQYADLFLAAKNLSD
AILLSDILRVNTEITKAPLSASMIKRYDEHHQDLILLKALVRQQLPEKYKEIFFDQSKNGYA
GYIDGGASQEEFYKFIKPILEKMDGTEELLVKLNREDLLRKQRTFDNGSIPHQIHLGELHAI
LRRQEDFYPFLKDNREKIEKILTFRIPYYVGPLARGNSRFAWMTRKSEETITPWNFEEVVDK
GASAQSFIERMINFDKNLPNEKVLPKHSLLYEYFTVYNELTKVKYVTEGMRKPAFLSGEQKK
AIVDLLFKINRKVIVKQLKEDYFKKIECFDSVEISGVEDRFNASLGTYHDLLKIIKDKDFLD
NEENEDILEDIVLILTLFEDREMIEERLKTYAHLFDDKVMKQLKRRRYTGWGRLSRKLINGI
RDKQSGKTILDFLKSDGFANRNFMQLIHDDSLIFKEDIQKAQVSGQGDSLHEHIANLAGSPA
IKKGILQTVKVVDELVKVMGRHKPENIVIEMARENQTTQKGQKNSRERMKRIEEGIKELGSQ
ILKEHPVENTQLQNEKLYLYYLQNGRDMYVDQELDINRLSDYDVDHIVPQSFLKDDSIDNKV
LIRSDKNRGKSDNVPSEEVVKKMKNYWRQLLNAKLITQRKEDNLIKAERGGLSELDKAGFIK
RQLVETRQIIKHVAQILDSRMNIKYDENDKLIREVKVITLKSKLVSDFRKDFQFYKVREINN
YHHAHDAYLNAVVGIALIKKYPKLESEFVYGDYKVYDVRKMIAKSEQEIGKATAKYFFYSNI
MNFFKTEITLANGEIRKRPLIETNGETGEIVWDKGRDFATVRKVLSMPQVNIVKKTEVQTGG
FSKESILPKRNSDKLIARKKDWDPKKYGGFVSPIVAYSVLVVAKVEKGKSKKLKSVKELLGI
TIMERSSFEKNPIDFLEAKGYKEVKKDLIIKLPKYSLFELENGRKRMLASARELQKGNELAL
PSKYVNFLYLASHYEKLKGSPEDNEQKQLFVEQHKHYLDEIIEQISEFSKRVILADANLDKV
LSAYNKHRDKPIREQAENIIHLFTLINLGAPAAFKYFDTTIDRKQYRSTKEVLDATLIHQSI
TGLYETRIDLSQLGGDEGADKRTADGSEFESPKKKRKV
10. monoABE8.1_bpNLS + Y147R_Q154R_T166R
MSEVEFSHEYWMRHALTLAKRARDEREVPVGAVLVLNNRVIGEGWNRAIGLHDPTAHAEIMA
LRQGGLVMQNYRLIDATLYVTFEPCVMCAGAMIHSRIGRVVFGVRNAKTGAAGSLMDVLHYP
GMNHRVEITEGILADECAALLCRFERMPRRVFNAQKKAQSSRDSGGSSGGSSGSETPGISES
ATPESSGGSSGGSDKKYSIGLAIGINSVGWAVITDEYKVPSKKFKVLGNIDRHSIKKNLIGA
LLFDSGETAEATRLKRTARRRYTRRKNRICYLQEIFSNEMAKVDDSFFHRLEESFLVEEDKK
HERHPIEGNIVDEVAYHEKYPTIYHLRKKLVDSTDKADLRLIYLALAHMIKERGHFLIEGDL
NPDNSDVDKLFIQLVQTYNQLFEENPINASGVDAKAILSARLSKSRRLENLIAQLPGEKKNG
LFGNLIALSLGLIPNEKSNFDLAEDAKLQLSKDTYDDDLDNLLAQIGDQYADLFLAAKNLSD
AILLSDILRVNTEITKAPLSASMIKRYDEHHQDLILLKALVRQQLPEKYKEIFFDQSKNGYA
GYIDGGASQEEFYKFIKPILEKMDGTEELLVKLNREDLLRKQRTFDNGSIPHQIHLGELHAI
LRRQEDFYPFLKDNREKIEKILTFRIPYYVGPLARGNSRFAWMTRKSEETITPWNFEEVVDK
GASAQSFIERMINFDKNLPNEKVLPKHSLLYEYFTVYNELTKVKYVTEGMRKPAFLSGEQKK
AIVDLLFKINRKVIVKQLKEDYFKKIECFDSVEISGVEDRFNASLGTYHDLLKIIKDKDFLD
NEENEDILEDIVLILTLFEDREMIEERLKTYAHLFDDKVMKQLKRRRYTGWGRLSRKLINGI
RDKQSGKTILDFLKSDGFANRNFMQLIHDDSLIFKEDIQKAQVSGQGDSLHEHIANLAGSPA
IKKGILQTVKVVDELVKVMGRHKPENIVIEMARENQTTQKGQKNSRERMKRIEEGIKELGSQ
ILKEHPVENTQLQNEKLYLYYLQNGRDMYVDQELDINRLSDYDVDHIVPQSFLKDDSIDNKV
LIRSDKNRGKSDNVPSEEVVKKMKNYWRQLLNAKLITQRKEDNLIKAERGGLSELDKAGFIK
RQLVETRQIIKHVAQILDSRMNIKYDENDKLIREVKVITLKSKLVSDFRKDFQFYKVREINN
YHHAHDAYLNAVVGIALIKKYPKLESEFVYGDYKVYDVRKMIAKSEQEIGKATAKYFFYSNI
MNFFKTEITLANGEIRKRPLIETNGETGEIVWDKGRDFATVRKVLSMPQVNIVKKTEVQTGG
FSKESILPKRNSDKLIARKKDWDPKKYGGFVSPIVAYSVLVVAKVEKGKSKKLKSVKELLGI
TIMERSSFEKNPIDFLEAKGYKEVKKDLIIKLPKYSLFELENGRKRMLASARELQKGNELAL
PSKYVNFLYLASHYEKLKGSPEDNEQKQLFVEQHKHYLDEIIEQISEFSKRVILADANLDKV
LSAYNKHRDKPIREQAENIIHLFTLINLGAPAAFKYFDTTIDRKQYRSTKEVLDATLIHQSI
TGLYETRIDLSQLGGDEGADKRTADGSEFESPKKKRKV
11. monoABE8.1_bpNLS + Y147T_Q154R
MSEVEFSHEYWMRHALTLAKRARDEREVPVGAVLVLNNRVIGEGWNRAIGLHDPTAHAEIMA
LRQGGLVMQNYRLIDATLYVTFEPCVMCAGAMIHSRIGRVVFGVRNAKTGAAGSLMDVLHYP
GMNHRVEITEGILADECAALLCIFFRMPRRVFNAQKKAQSSIDSGGSSGGSSGSETPGISES
ATPESSGGSSGGSDKKYSIGLAIGINSVGWAVITDEYKVPSKKFKVLGNIDRHSIKKNLIGA
LLFDSGETAEATRLKRTARRRYTRRKNRICYLQEIFSNEMAKVDDSFFHRLEESFLVEEDKK
HERHPIFGNIVDEVAYHEKYPTIYHLRKKLVDSTDKADLRLIYLALAHMIKFRGHFLIEGDL
NPDNSDVDKLFIQLVQTYNQLFEENPINASGVDAKAILSARLSKSRRLENLIAQLPGEKKNG
LFGNLIALSLGLIPNEKSNFDLAEDAKLQLSKDTYDDDLDNLLAQIGDQYADLFLAAKNLSD
AILLSDILRVNTEITKAPLSASMIKRYDEHHQDLILLKALVRQQLPEKYKEIFFDQSKNGYA
GYIDGGASQEEFYKFIKPILEKMDGTEELLVKLNREDLLRKQRTFDNGSIPHQIHLGELHAI
LRRQEDFYPFLKDNREKIEKILTFRIPYYVGPLARGNSRFAWMTRKSEETITPWNFEEVVDK
GASAQSFIERMINFDKNLPNEKVLPKHSLLYEYFTVYNELTKVKYVTEGMRKPAFLSGEQKK
AIVDLLFKINRKVIVKQLKEDYFKKIECFDSVEISGVEDRFNASLGTYHDLLKIIKDKDFLD
NEENEDILEDIVLILTLFEDREMIEERLKTYAHLFDDKVMKQLKRRRYTGWGRLSRKLINGI
RDKQSGKTILDFLKSDGFANRNFMQLIHDDSLIFKEDIQKAQVSGQGDSLHEHIANLAGSPA
IKKGILQTVKVVDELVKVMGRHKPENIVIEMARENQTTQKGQKNSRERMKRIEEGIKELGSQ
ILKEHPVENTQLQNEKLYLYYLQNGRDMYVDQELDINRLSDYDVDHIVPQSFLKDDSIDNKV
LIRSDKNRGKSDNVPSEEVVKKMKNYWRQLLNAKLITQRKEDNLIKAERGGLSELDKAGFIK
RQLVETRQIIKHVAQILDSRMNIKYDENDKLIREVKVITLKSKLVSDFRKDFQFYKVREINN
YHHAHDAYLNAVVGIALIKKYPKLESEFVYGDYKVYDVRKMIAKSEQEIGKATAKYFFYSNI
MNFFKTEITLANGEIRKRPLIETNGETGEIVWDKGRDFATVRKVLSMPQVNIVKKTEVQTGG
FSKESILPKRNSDKLIARKKDWDPKKYGGFVSPIVAYSVLVVAKVEKGKSKKLKSVKELLGI
TIMERSSFEKNPIDFLEAKGYKEVKKDLIIKLPKYSLFELENGRKRMLASARELQKGNELAL
PSKYVNFLYLASHYEKLKGSPEDNEQKQLFVEQHKHYLDEIIEQISEFSKRVILADANLDKV
LSAYNKHRDKPIREQAENIIHLFTLINLGAPAAFKYFDTTIDRKQYRSTKEVLDATLIHQSI
TGLYETRIDLSQLGGDEGADKRTADGSEFESPKKKRKV
12. monoABE8.1_bpNLS + Y147T_Q154S
MSEVEFSHEYWMRHALTLAKRARDEREVPVGAVLVLNNRVIGEGWNRAIGLHDPTAHAEIMA
LRQGGLVMQNYRLIDATLYVTFEPCVMCAGAMIHSRIGRVVFGVRNAKTGAAGSLMDVLHYP
GMNHRVEITEGILADECAALLCIFFRMPRSVFNAQKKAQSSIDSGGSSGGSSGSETPGISES
ATPESSGGSSGGSDKKYSIGLAIGINSVGWAVITDEYKVPSKKFKVLGNIDRHSIKKNLIGA
LLFDSGETAEATRLKRTARRRYTRRKNRICYLQEIFSNEMAKVDDSFFHRLEESFLVEEDKK
HERHPIEGNIVDEVAYHEKYPTIYHLRKKLVDSTDKADLRLIYLALAHMIKERGHFLIEGDL
NPDNSDVDKLFIQLVQTYNQLFEENPINASGVDAKAILSARLSKSRRLENLIAQLPGEKKNG
LFGNLIALSLGLIPNEKSNFDLAEDAKLQLSKDTYDDDLDNLLAQIGDQYADLFLAAKNLSD
AILLSDILRVNTEITKAPLSASMIKRYDEHHQDLILLKALVRQQLPEKYKEIFFDQSKNGYA
GYIDGGASQEEFYKFIKPILEKMDGTEELLVKLNREDLLRKQRTFDNGSIPHQIHLGELHAI
LRRQEDFYPFLKDNREKIEKILTFRIPYYVGPLARGNSRFAWMTRKSEETITPWNFEEVVDK
GASAQSFIERMINFDKNLPNEKVLPKHSLLYEYFTVYNELTKVKYVTEGMRKPAFLSGEQKK
AIVDLLFKINRKVIVKQLKEDYFKKIECFDSVEISGVEDRFNASLGTYHDLLKIIKDKDFLD
NEENEDILEDIVLILTLFEDREMIEERLKTYAHLFDDKVMKQLKRRRYTGWGRLSRKLINGI
RDKQSGKTILDFLKSDGFANRNFMQLIHDDSLIFKEDIQKAQVSGQGDSLHEHIANLAGSPA
IKKGILQTVKVVDELVKVMGRHKPENIVIEMARENQTTQKGQKNSRERMKRIEEGIKELGSQ
ILKEHPVENTQLQNEKLYLYYLQNGRDMYVDQELDINRLSDYDVDHIVPQSFLKDDSIDNKV
LIRSDKNRGKSDNVPSEEVVKKMKNYWRQLLNAKLITQRKEDNLIKAERGGLSELDKAGFIK
RQLVETRQIIKHVAQILDSRMNIKYDENDKLIREVKVITLKSKLVSDFRKDFQFYKVREINN
YHHAHDAYLNAVVGIALIKKYPKLESEFVYGDYKVYDVRKMIAKSEQEIGKATAKYFFYSNI
MNFFKTEITLANGEIRKRPLIETNGETGEIVWDKGRDFATVRKVLSMPQVNIVKKTEVQTGG
FSKESILPKRNSDKLIARKKDWDPKKYGGFVSPIVAYSVLVVAKVEKGKSKKLKSVKELLGI
TIMERSSFEKNPIDFLEAKGYKEVKKDLIIKLPKYSLFELENGRKRMLASARELQKGNELAL
PSKYVNFLYLASHYEKLKGSPEDNEQKQLFVEQHKHYLDEIIEQISEFSKRVILADANLDKV
LSAYNKHRDKPIREQAENIIHLFTLINLGAPAAFKYFDTTIDRKQYRSTKEVLDATLIHQSI
TGLYETRIDLSQLGGDEGADKRTADGSEFESPKKKRKV
13. monoABE8.1_bpNLS + H123Y123H_Y147R_Q154R_I76Y
MSEVEFSHEYWMRHALTLAKRARDEREVPVGAVLVLNNRVIGEGWNRAIGLHDPTAHAEIMA
LRQGGLVMQNYRLYDATLYVTFEPCVMCAGAMIHSRIGRVVFGVRNAKTGAAGSLMDVLHHP
GMNHRVEITEGILADECAALLCRFERMPRRVFNAQKKAQSSIDSGGSSGGSSGSETPGISES
ATPESSGGSSGGSDKKYSIGLAIGINSVGWAVITDEYKVPSKKFKVLGNIDRHSIKKNLIGA
LLFDSGETAEATRLKRTARRRYTRRKNRICYLQEIFSNEMAKVDDSFFHRLEESFLVEEDKK
HERHPIEGNIVDEVAYHEKYPTIYHLRKKLVDSTDKADLRLIYLALAHMIKERGHFLIEGDL
NPDNSDVDKLFIQLVQTYNQLFEENPINASGVDAKAILSARLSKSRRLENLIAQLPGEKKNG
LFGNLIALSLGLIPNEKSNFDLAEDAKLQLSKDTYDDDLDNLLAQIGDQYADLFLAAKNLSD
AILLSDILRVNTEITKAPLSASMIKRYDEHHQDLILLKALVRQQLPEKYKEIFFDQSKNGYA
GYIDGGASQEEFYKFIKPILEKMDGTEELLVKLNREDLLRKQRTFDNGSIPHQIHLGELHAI
LRRQEDFYPFLKDNREKIEKILTFRIPYYVGPLARGNSRFAWMTRKSEETITPWNFEEVVDK
GASAQSFIERMINFDKNLPNEKVLPKHSLLYEYFTVYNELTKVKYVTEGMRKPAFLSGEQKK
AIVDLLFKINRKVIVKQLKEDYFKKIECFDSVEISGVEDRFNASLGTYHDLLKIIKDKDFLD
NEENEDILEDIVLILTLFEDREMIEERLKTYAHLFDDKVMKQLKRRRYTGWGRLSRKLINGI
RDKQSGKTILDFLKSDGFANRNFMQLIHDDSLIFKEDIQKAQVSGQGDSLHEHIANLAGSPA
IKKGILQTVKVVDELVKVMGRHKPENIVIEMARENQTTQKGQKNSRERMKRIEEGIKELGSQ
ILKEHPVENTQLQNEKLYLYYLQNGRDMYVDQELDINRLSDYDVDHIVPQSFLKDDSIDNKV
LIRSDKNRGKSDNVPSEEVVKKMKNYWRQLLNAKLITQRKEDNLIKAERGGLSELDKAGFIK
RQLVETRQIIKHVAQILDSRMNIKYDENDKLIREVKVITLKSKLVSDFRKDFQFYKVREINN
YHHAHDAYLNAVVGIALIKKYPKLESEFVYGDYKVYDVRKMIAKSEQEIGKATAKYFFYSNI
MNFFKTEITLANGEIRKRPLIETNGETGEIVWDKGRDFATVRKVLSMPQVNIVKKTEVQTGG
FSKESILPKRNSDKLIARKKDWDPKKYGGFVSPIVAYSVLVVAKVEKGKSKKLKSVKELLGI
TIMERSSFEKNPIDFLEAKGYKEVKKDLIIKLPKYSLFELENGRKRMLASARELQKGNELAL
PSKYVNFLYLASHYEKLKGSPEDNEQKQLFVEQHKHYLDEIIEQISEFSKRVILADANLDKV
LSAYNKHRDKPIREQAENIIHLFTLINLGAPAAFKYFDTTIDRKQYRSTKEVLDATLIHQSI
TGLYETRIDLSQLGGDEGADKRTADGSEFESPKKKRKV
14. monoABE8.1_bpNLS + V82S + Q154R
MSEVEFSHEYWMRHALTLAKRARDEREVPVGAVLVLNNRVIGEGWNRAIGLHDPTAHAEIMA
LRQGGLVMQNYRLIDAILYSTFEPCVMCAGAMIHSRIGRVVFGVRNAKTGAAGSLMDVLHYP
GMNHRVEITEGILADECAALLCYFFRMPRRVFNAQKKAQSSTDSGGSSGGSSGSETPGTSES
ATPESSGGSSGGSDKKYSIGLAIGINSVGWAVITDEYKVPSKKFKVLGNTDRHSIKKNLIGA
LLFDSGETAEATRLKRTARRRYTRRKNRICYLQEIFSNEMAKVDDSFFHRLEESFLVEEDKK
HERHPIFGNIVDEVAYHEKYPTIYHLRKKLVDSTDKADLRLIYLALAHMIKFRGHFLIEGDL
NPDNSDVDKLFIQLVQTYNQLFEENPINASGVDAKAILSARLSKSRRLENLIAQLPGEKKNG
LFGNLIALSLGLTPNFKSNFDLAEDAKLQLSKDTYDDDLDNLLAQIGDQYADLFLAAKNLSD
AILLSDILRVNTEITKAPLSASMIKRYDEHHQDLTLLKALVRQQLPEKYKEIFFDQSKNGYA
GYIDGGASQEEFYKFIKPILEKMDGTEELLVKLNREDLLRKQRTFDNGSIPHQIHLGELHAI
LRRQEDFYPFLKDNREKIEKILTFRIPYYVGPLARGNSRFAWMTRKSEETITPWNFEEVVDK
GASAQSFIERMTNFDKNLPNEKVLPKHSLLYEYFTVYNELTKVKYVTEGMRKPAFLSGEQKK
AIVDLLFKINRKVIVKQLKEDYFKKIECFDSVEISGVEDRFNASLGTYHDLLKIIKDKDFLD
NEENEDILEDIVLTLTLFEDREMIEERLKTYAHLFDDKVMKQLKRRRYTGWGRLSRKLINGI
RDKQSGKTILDFLKSDGFANRNFMQLIHDDSLTFKEDIQKAQVSGQGDSLHEHIANLAGSPA
IKKGILQTVKVVDELVKVMGRHKPENIVIEMARENQTTQKGQKNSRERMKRIEEGIKELGSQ
ILKEHPVENTQLQNEKLYLYYLQNGRDMYVDQELDINRLSDYDVDHIVPQSFLKDDSIDNKV
LTRSDKNRGKSDNVPSEEVVKKMKNYWRQLLNAKLITQRKFDNLTKAERGGLSELDKAGFIK
RQLVETRQITKHVAQILDSRMNTKYDENDKLIREVKVITLKSKLVSDFRKDFQFYKVREINN
YHHAHDAYLNAVVGTALIKKYPKLESEFVYGDYKVYDVRKMIAKSEQEIGKATAKYFFYSNI
MNFFKTEITLANGEIRKRPLIETNGETGEIVWDKGRDFATVRKVLSMPQVNIVKKTEVQTGG
FSKESILPKRNSDKLIARKKDWDPKKYGGFVSPTVAYSVLVVAKVEKGKSKKLKSVKELLGI
TIMERSSFEKNPIDFLEAKGYKEVKKDLIIKLPKYSLFELENGRKRMLASARELQKGNELAL
PSKYVNFLYLASHYEKLKGSPEDNEQKQLFVEQHKHYLDEIIEQISEFSKRVILADANLDKV
LSAYNKHRDKPIREQAENIIHLFTLTNLGAPAAFKYFDTTIDRKQYRSTKEVLDATLIHQSI
TGLYETRIDLSQLGGDEGADKRTADGSEFESPKKKRKV

[0610] In some embodiments, the ABE8 is ABE8a-m, which has a monomeric construct containing TadA*7.10 with R26C, A109S, T111R, D119N, H122N, Y147D, F149Y, 11661, and D167N mutations (TadA*8a). In some embodiments, the ABE8 is ABE8b-m, which has a monomeric construct containing TadA*7.10 with V88A, A109S, T111R, D119N, H122N, F149Y, T166I, and D167N mutations (TadA*8b). In some embodiments, the ABE8 is ABE8c-m, which has a monomeric construct containing TadA*7.10 with R26C, A109S, T111R, D119N, H122N, F149Y, 11661, and D167N mutations (TadA*8c). In some embodiments, the ABE8 is ABE8d-m, which has a monomeric construct containing TadA*7.10 with V88A, T111R, D119N, and F149Y mutations (TadA*8d). In some embodiments, the ABE8 is ABE8e-m, which has a monomeric construct containing TadA*7.10 with A109S, T111R, D119N, H122N, Y147D, F149Y, T166I, and D167N mutations (TadA*8e).

[0611] In some embodiments, the ABE8 is ABE8a-d, which has a heterodimeric construct containing wild-type E. coli TadA fused to TadA*7.10 with R26C, A109S, T111R, D119, H122N, Y147D, F149Y, T166I, and D167N mutations (TadA*8a). In some embodiments, the ABE8 is ABE8b-d, which has a heterodimeric construct containing wild-type E. coli TadA fused to TadA*7.10 with V88A, A109S, T111R, D119N, H122N, F149Y, T166I, and D167N mutations (TadA*8b). In some embodiments, the ABE8 is ABE8c-d, which has a heterodimeric construct containing wild-type E. coli TadA fused to TadA*7.10 with R26C, A109S, T111R, D119N, H122N, F149Y, T166I, and D167N mutations (TadA*8c). In some embodiments, the ABE8 is ABE8d-d, which has a heterodimeric construct containing wild-type E. coli TadA fused to TadA*7.10 with V88A, T111R, D119N, and F149Y mutations (TadA*8d). In some embodiments, the ABE8 is ABE8e-d, which has a heterodimeric construct containing wild-type E. coli TadA fused to TadA*7.10 with A109S, T111R, D119N, H122N, Y147D, F149Y, T166I, and D167N mutations (TadA*8e).

[0612] In some embodiments, the ABE8 is ABE8a-7, which has a heterodimeric construct containing TadA*7.10 fused to TadA*7.10 with R26C, A109S, T111R, D119, H122N, Y147D, F149Y, T166I, and D167N mutations (TadA*8a). In some embodiments, the ABE8 is ABE8b-7, which has a heterodimeric construct containing TadA*7.10 fused to TadA*7.10 with V88A, A109S, T111R, D119N, H122N, F149Y, T166I, and D167N mutations (TadA*8b). In some embodiments, the ABE8 is ABE8c-7, which has a heterodimeric construct containing TadA*7.10 fused to TadA*7.10 with R26C, A109S, T111R, D119N, H122N, F149Y, T166I, and D167N mutations (TadA*8c). In some embodiments, the ABE8 is ABE8d-7, which has a heterodimeric construct containing TadA*7.10 fused to TadA*7.10 with V88A, T111R, D119N, and F149Y mutations (TadA*8d). In some embodiments, the ABE8 is ABE8e-7, which has a heterodimeric construct containing TadA*7.10 fused to TadA*7.10 with A109S, T111R, D119N, H122N, Y147D, F149Y, T166I, and D167N mutations (TadA*8e).

[0613] In some embodiments, the ABE is ABE8a-m, ABE8b-m, ABE8c-m, ABE8d-m, ABE8e-m, ABE8a-d, ABE8b-d, ABE8c-d, ABE8d-d, or ABE8e-d, as shown in Table 7B below. In some embodiments, the ABE is ABE8e-m or ABE8e-d. ABE8e shows efficient adenine base editing activity and low indel formation when used with Cas homologues other than SpCas9, for example, SaCas9, SaCas9-KKH, Cas12a homologues, e.g., LbCas12a, enAs-Cas12a, SpCas9-NG and circularly permuted CP1028-SpCas9 and CP1041-SpCas9. In addition to the mutations shown for ABE8e in Table X, off-target RNA and DNA editing were reduced by introducing a V106W substitution into the TadA domain (as described in M. Richter et al., 2020, Nature Biotechnology, doi.org/10.1038/s41587-020-0453-z, the entire contents of which are incorporated by reference herein).

TABLE 7B
Additional Adenosine Deaminase Base Editor 8 Variants

| ABE8 Base | Adenosine | |
|---|---|---|
| Editor | Deaminase | Adenosine Deaminase Description |
| ABESa-m | TadA*8a | Monomer_TadA*7.10 + R26C + A109S + T111R + D119N + |
| | | H122N + Y147D + F149Y + T166I + D167N |
| ABE8b-m | TadA*8b | Monomer_TadA*7.10 + V88A + A109S + T111R + D119N + |
| | | H122N + F149Y + T166I + D167N |
| ABE8c-m | TadA*8c | Monomer_TadA*7.10 + R26C + A109S + T111R + D119N + |
| | | H122N + F149Y + T166I + D167N |
| ABESd-m | TadA*8d | Monomer_TadA*7.10 + V88A + T111R + D119N + F149Y |
| ABEZe-m | TadA*8e | Monomer_TadA*7.10 + A109S + T111R + D119N + |
| | | H122N + Y147D + F149Y + T166I + D167N |
| ABESa-d | TadA*8a | Heterodimer_(WT) + (TadA*7.10 + R26C + A109S + T111R + |
| | | D119N + H122N + Y147D + F149Y + T166I + D167N) |
| ABE8b-d | TadA*8b | Heterodimer_(WT) + (TadA*7.10 + V88A + A109S + |
| | | T111R + D119N + H122N + F149Y + T166I + D167N) |
| ABE8c-d | TadA*8c | Heterodimer_(WT) + (TadA*7.10 + R26C + A109S + |
| | | T111R + D119N + H122N + F149Y + T166I + D167N) |
| ABE8d-d | TadA*8d | Heterodimer_(WT) + (TadA*7.10 + V88A + T111R + |
| | | D119N + F149Y) |
| ABE8e-d | TadA*8e | Heterodimer_(WT) + (TadA*7.10 + A109S + T111R + |
| | | D119N + H122N + Y147D + F149Y + T166I + D167N) |

[0614] In some embodiments, the base editor further comprises a domain comprising all or a portion of a uracil glycosylase inhibitor (UGI). In some embodiments, the base editor comprises a domain comprising all or a portion of a uracil binding protein (UBP), such as a uracil DNA glycosylase (UDG). In some embodiments, the base editor comprises a domain comprising all or a portion of a nucleic acid polymerase. In some embodiments, a nucleic acid polymerase or portion thereof incorporated into a base editor is a translesion DNA polymerase.

[0615] In some embodiments, a domain of the base editor can comprise multiple domains. For example, the base editor comprising a polynucleotide programmable nucleotide binding domain derived from Cas9 can comprise an REC lobe and an NUC lobe corresponding to the REC lobe and NUC lobe of a wild-type or natural Cas9. In another example, the base editor can comprise one or more of a RuvCI domain, BH domain, REC1 domain, REC2 domain, RuvCII domain, L1 domain, HNH domain, L2 domain, RuvCIII domain, WED domain, TOPO domain or CTD domain. In some embodiments, one or more domains of the base editor comprise a mutation (e.g., substitution, insertion, deletion) relative to a wild type version of a polypeptide comprising the domain. For example, an HNH domain of a polynucleotide programmable DNA binding domain can comprise an H840A substitution. In another example, a RuvCI domain of a polynucleotide programmable DNA binding domain can comprise a D10A substitution.

[0616] Different domains (e.g., adjacent domains) of the base editor disclosed herein can be connected to each other with or without the use of one or more linker domains (e.g., an XTEN linker domain). In some embodiments, a linker domain can be a bond (e.g., covalent bond), chemical group, or a molecule linking two molecules or moieties, e.g., two domains of a fusion protein, such as, for example, a first domain (e.g., Cas9-derived domain) and a second domain (e.g., an adenosine deaminase domain or a cytidine deaminase domain). In some embodiments, a linker is a covalent bond (e.g., a carbon-carbon bond, disulfide bond, carbon-hetero atom bond, etc.). In certain embodiments, a linker is a carbon nitrogen bond of an amide linkage. In certain embodiments, a linker is a cyclic or acyclic, substituted or unsubstituted, branched or unbranched aliphatic or heteroaliphatic linker. In certain embodiments, a linker is polymeric (e.g., polyethylene, polyethylene glycol, polyamide, polyester, etc.). In certain embodiments, a linker comprises a monomer, dimer, or polymer of aminoalkanoic acid. In some embodiments, a linker comprises an aminoalkanoic acid (e.g., glycine, ethanoic acid, alanine, beta-alanine, 3-aminopropanoic acid, 4-aminobutanoic acid, 5-pentanoic acid, etc.). In some embodiments, a linker comprises a monomer, dimer, or polymer of aminohexanoic acid (Ahx). In certain embodiments, a linker is based on a carbocyclic moiety (e.g., cyclopentane, cyclohexane). In other embodiments, a linker comprises a polyethylene glycol moiety (PEG). In certain embodiments, a linker comprises an aryl or heteroaryl moiety. In certain embodiments, the linker is based on a phenyl ring. A linker can include functionalized moieties to facilitate attachment of a nucleophile (e.g., thiol, amino) from the peptide to the linker. Any electrophile can be used as part of the linker. Exemplary electrophiles include, but are not limited to, activated esters, activated amides, Michael acceptors, alkyl halides, aryl halides, acyl halides, and isothiocyanates. In some embodiments, a linker joins a gRNA binding domain of an RNA-programmable nuclease, including a Cas9 nuclease domain, and the catalytic domain of a nucleic acid editing protein. In some embodiments, a linker joins a dCas9 and a second domain (e.g., UGI, cytidine deaminase, etc.).

[0617] Typically, a linker is positioned between, or flanked by, two groups, molecules, or other moieties and connected to each one via a covalent bond, thus connecting the two. In some embodiments, a linker is an amino acid or a plurality of amino acids (e.g., a peptide or protein). In some embodiments, a linker is an organic molecule, group, polymer, or chemical moiety. In some embodiments, a linker is 2-100 amino acids in length, for example, 2, 3, 4, 5, 6, 7, 8, 9, 10, 11, 12, 13, 14, 15, 16, 17, 18, 19, 20, 21, 22, 23, 24, 25, 26, 27, 28, 29, 30, 30-35, 35-40, 40-45, 45-50, 50-60, 60-70, 70-80, 80-90, 90-100, 100-150, or 150-200 amino acids in length. In some embodiments, the linker is about 3 to about 104 (e.g., 5, 6, 7, 8, 9, 10, 11, 12, 13, 14, 15, 16, 17, 18, 19, 20, 21, 22, 23, 24, 25, 26, 27, 28, 29, 30, 31, 32, 33, 34, 35, 36, 37, 38, 39, 40, 41, 42, 43, 44, 45, 46, 47, 48, 49, 50, 55, 60, 65, 70, 75, 80, 85, 90, 95, or 100) amino acids in length. Longer or shorter linkers are also contemplated. In some embodiments, a linker domain comprises the amino acid sequence SGSETPGTSESATPES, which can also be referred to as the XTEN linker. Any method for linking the fusion protein domains can be employed (e.g., ranging from very flexible linkers of the form (SGGS)n, (GGGS)n, (GGGGS)n, and (G)n, to more rigid linkers of the form (EAAAK)n, (GGS)n, SGSETPGTSESATPES (see, e.g., Guilinger J P, Thompson D B, Liu D R. Fusion of catalytically inactive Cas9 to FokI nuclease improves the specificity of genome modification. Nat. Biotechnol. 2014; 32(6): 577-82; the entire contents are incorporated herein by reference), or (XP)n motif, in order to achieve the optimal length for activity for the nucleobase editor. In some embodiments, n is 1, 2, 3, 4, 5, 6, 7, 8, 9, 10, 11, 12, 13, 14, or 15. In some embodiments, the linker comprises a (GGS)n motif, wherein n is 1, 3, or 7. In some embodiments, the Cas9 domain of the fusion proteins provided herein are fused via a linker comprising the amino acid sequence SGSETPGTSESATPES. In some embodiments, a linker comprises a plurality of proline residues and is 5-21, 5-14, 5-9, 5-7 amino acids in length, e.g., PAPAP, PAPAPA, PAPAPAP, PAPAPAPA, P(AP)4, P(AP)7, P(AP)10 (see, e.g., Tan J, Zhang F, Karcher D, Bock R. Engineering of high-precision base editors for site-specific single nucleotide replacement. Nat Commun. 2019 Jan. 25; 10(1):439; the entire contents are incorporated herein by reference). Such proline-rich linkers are also termed “rigid” linkers.

### Linkers

[0618] In certain embodiments, linkers may be used to link any of the peptides or peptide domains of the invention. The linker may be as simple as a covalent bond, or it may be a polymeric linker many atoms in length. In certain embodiments, the linker is a polypeptide or based on amino acids. In other embodiments, the linker is not peptide-like. In certain embodiments, the linker is a covalent bond (e.g., a carbon-carbon bond, disulfide bond, carbon-heteroatom bond, etc.). In certain embodiments, the linker is a carbon-nitrogen bond of an amide linkage. In certain embodiments, the linker is a cyclic or acyclic, substituted or unsubstituted, branched or unbranched aliphatic or heteroaliphatic linker. In certain embodiments, the linker is polymeric (e.g., polyethylene, polyethylene glycol, polyamide, polyester, etc.). In certain embodiments, the linker comprises a monomer, dimer, or polymer of aminoalkanoic acid. In certain embodiments, the linker comprises an aminoalkanoic acid (e.g., glycine, ethanoic acid, alanine, beta-alanine, 3-aminopropanoic acid, 4-aminobutanoic acid, 5-pentanoic acid, etc.). In certain embodiments, the linker comprises a monomer, dimer, or polymer of aminohexanoic acid (Ahx). In certain embodiments, the linker is based on a carbocyclic moiety (e.g., cyclopentane, cyclohexane). In other embodiments, the linker comprises a polyethylene glycol moiety (PEG). In other embodiments, the linker comprises amino acids. In certain embodiments, the linker comprises a peptide. In certain embodiments, the linker comprises an aryl or heteroaryl moiety. In certain embodiments, the linker is based on a phenyl ring. The linker may include functionalized moieties to facilitate attachment of a nucleophile (e.g., thiol, amino) from the peptide to the linker. Any electrophile may be used as part of the linker. Exemplary electrophiles include, but are not limited to, activated esters, activated amides, Michael acceptors, alkyl halides, aryl halides, acyl halides, and isothiocyanates.

[0619] In some embodiments, the linker is an amino acid or a plurality of amino acids (e.g., a peptide or protein). In some embodiments, the linker is a bond (e.g., a covalent bond), an organic molecule, group, polymer, or chemical moiety. In some embodiments, the linker is about 3 to about 104 (e.g., 5, 6, 7, 8, 9, 10, 11, 12, 13, 14, 15, 16, 17, 18, 19, 20, 21, 22, 23, 24, 25, 26, 27, 28, 29, 30, 31, 32, 33, 34, 35, 36, 37, 38, 39, 40, 41, 42, 43, 44, 45, 46, 47, 48, 49, 50, 55, 60, 65, 70, 75, 80, 85, 90, 95, or 100) amino acids in length.

[0620] In some embodiments, the cytidine deaminase and adenosine deaminase and the napDNAbp are fused via a linker that is 4, 16, 32, or 104 amino acids in length. In some embodiments, the linker is about 3 to about 104 amino acids in length. In some embodiments, any of the fusion proteins provided herein, comprise a cytidine deaminase, adenosine deaminase and a Cas9 domain that are fused to each other via a linker. Various linker lengths and flexibilities between the deaminase domain (e.g., an engineered ecTadA) and the Cas9 domain can be employed (e.g., ranging from very flexible linkers of the form (GGGS)ₙ, (GGGGS)ₙ, and (G)ₙ to more rigid linkers of the form (EAAAK)ₙ, (SGGS)ₙ, SGSETPGTSESATPES (see, e.g., Guilinger J P, Thompson D B, Liu D R. Fusion of catalytically inactive Cas9 to FokI nuclease improves the specificity of genome modification. Nat. Biotechnol. 2014; 32(6): 577-82; the entire contents are incorporated herein by reference) and (XP)ₙ) in order to achieve the optimal length for activity for the nucleobase editor. In some embodiments, n is 1, 2, 3, 4, 5, 6, 7, 8, 9, 10, 11, 12, 13, 14, or 15. In some embodiments, the linker comprises a (GGS)ₙ motif, wherein n is 1, 3, or 7. In some embodiments, the cytidine deaminase and adenosine deaminase and the Cas9 domain of any of the fusion proteins provided herein are fused via a linker (e.g., an XTEN linker) comprising the amino acid sequence SGSETPGTSESATPES.

[0621] In some embodiments, the target region comprises a target window, wherein the target window comprises the target nucleobase pair. In some embodiments, the target window comprises 1-10 nucleotides. In some embodiments, the target window is 1, 2, 3, 4, 5, 6, 7, 8, 9, 10, 11, 12, 13, 14, 15, 16, 17, 18, 19, or 20 nucleotides in length. In some embodiments, the intended edit of base pair is within the target window. In some embodiments, the target window comprises the intended edit of base pair. In some embodiments, the method is performed using any of the base editors provided herein. In some embodiments, a target window is a deamination window.

[0622] Additionally, in some cases, a Gam protein can be fused to an N terminus of a base editor. In some cases, a Gam protein can be fused to a C-terminus of a base editor. The Gam protein of bacteriophage Mu can bind to the ends of double strand breaks (DSBs) and protect them from degradation. In some embodiments, using Gam to bind the free ends of DSB can reduce indel formation during the process of base editing. In some embodiments, 174-residue Gam protein is fused to the N terminus of the base editors. See. Komor, A. C., et al., “Improved base excision repair inhibition and bacteriophage Mu Gam protein yields C:G-to-T:A base editors with higher efficiency and product purity” Science Advances 3:eaao4774 (2017). In some cases, a mutation or mutations can change the length of a base editor domain relative to a wild type domain. For example, a deletion of at least one amino acid in at least one domain can reduce the length of the base editor. In another case, a mutation or mutations do not change the length of a domain relative to a wild type domain. For example, substitution(s) in any domain does/do not change the length of the base editor.

[0623] In some embodiments, the base editing fusion proteins provided herein need to be positioned at a precise location, for example, where a target base is placed within a defined region (e.g., a “deamination window”). In some cases, a target can be within a 4 base region. In some cases, such a defined target region can be approximately 15 bases upstream of the PAM. See Komor, A. C., et al., “Programmable editing of a target base in genomic DNA without double-stranded DNA cleavage” Nature 533, 420-424 (2016); Gaudelli, N. M., et al., “Programmable base editing of A⋅T to G⋅C in genomic DNA without DNA cleavage” Nature 551, 464-471 (2017); and Komor, A. C., et al., “Improved base excision repair inhibition and bacteriophage Mu Gam protein yields C:G-to-T:A base editors with higher efficiency and product purity” Science Advances 3:eaao4774 (2017), the entire contents of which are hereby incorporated by reference.

[0624] A defined target region can be a deamination window. A deamination window can be the defined region in which a base editor acts upon and deaminates a target nucleotide. In some embodiments, the deamination window is within a 2, 3, 4, 5, 6, 7, 8, 9, or 10 base regions. In some embodiments, the deamination window is 5, 6, 7, 8, 9, 10, 11, 12, 13, 14, 15, 16, 17, 18, 19, 20, 21, 22, 23, 24, or 25 bases upstream of the PAM.

[0625] The base editors of the present disclosure can comprise any domain, feature or amino acid sequence which facilitates the editing of a target polynucleotide sequence. For example, in some embodiments, the base editor comprises a nuclear localization sequence (NLS). In some embodiments, an NLS of the base editor is localized between a deaminase domain and a polynucleotide programmable nucleotide binding domain. In some embodiments, an NLS of the base editor is localized C-terminal to a polynucleotide programmable nucleotide binding domain.

[0626] Other exemplary features that can be present in a base editor as disclosed herein are localization sequences, such as cytoplasmic localization sequences, export sequences, such as nuclear export sequences, or other localization sequences, as well as sequence tags that are useful for solubilization, purification, or detection of the fusion proteins. Suitable protein tags provided herein include, but are not limited to, biotin carboxylase carrier protein (BCCP) tags, myc-tags, calmodulin-tags, FLAG-tags, hemagglutinin (HA)-tags, polyhistidine tags, also referred to as histidine tags or His-tags, maltose binding protein (MBP)-tags, nus-tags, glutathione-S-transferase (GST)-tags, green fluorescent protein (GFP)-tags, thioredoxin-tags, S-tags, Softags (e.g., Softag 1, Softag 3), strep-tags, biotin ligase tags, FlAsH tags, V5 tags, and SBP-tags. Additional suitable sequences will be apparent to those of skill in the art. In some embodiments, the fusion protein comprises one or more His tags.

[0627] Non-limiting examples of protein domains which can be included in the fusion protein include deaminase domains (e.g., cytidine deaminase, adenosine deaminase), a uracil glycosylase inhibitor (UGI) domain, epitope tags, and reporter gene sequences.

[0628] Non-limiting examples of epitope tags include histidine (His) tags, V5 tags, FLAG tags, influenza hemagglutinin (HA) tags, Myc tags, VSV-G tags, and thioredoxin (Trx) tags. Examples of reporter genes include, but are not limited to, glutathione-5-transferase (GST), horseradish peroxidase (HRP), chloramphenicol acetyltransferase (CAT) beta-galactosidase, beta-glucuronidase, luciferase, green fluorescent protein (GFP), HcRed, DsRed, cyan fluorescent protein (CFP), yellow fluorescent protein (YFP), and autofluorescent proteins including blue fluorescent protein (BFP). Additional protein sequences can include amino acid sequences that bind DNA molecules or bind other cellular molecules, including, but not limited to, maltose binding protein (MBP), S-tag, Lex A DNA binding domain (DBD) fusions, GAL4 DNA binding domain fusions, and herpes simplex virus (HSV) BP16 protein fusions.

### Base Editor Efficiency

[0629] CRISPR-Cas9 nucleases have been widely used to mediate targeted genome editing. In most genome editing applications, Cas9 forms a complex with a guide polynucleotide (e.g., single guide RNA (sgRNA)) and induces a double-stranded DNA break (DSB) at the target site specified by the sgRNA sequence. Cells primarily respond to this DSB through the non-homologous end-joining (NHEJ) repair pathway, which results in stochastic insertions or deletions (indels) that can cause frameshift mutations that disrupt the gene. In the presence of a donor DNA template with a high degree of homology to the sequences flanking the DSB, gene editing can be achieved through an alternative pathway known as homology directed repair (HDR). Unfortunately, under most non-perturbative conditions, HDR is inefficient, dependent on cell state and cell type, and dominated by a larger frequency of indels. As most of the known genetic variations associated with human disease are point mutations, methods that can more efficiently and cleanly make precise point mutations are needed. Base editing systems as provided herein provide a new way to provide genome editing without generating double-strand DNA breaks, without requiring a donor DNA template, and without inducing an excess of stochastic insertions and deletions.

[0630] The base editors provided herein are capable of modifying a specific nucleotide base without generating a significant proportion of indels. The term “indel(s)”, as used herein, refers to the insertion or deletion of a nucleotide base within a nucleic acid. Such insertions or deletions can lead to frame shift mutations within a coding region of a gene. In some embodiments, it is desirable to generate base editors that efficiently modify (e.g., mutate or deaminate) a specific nucleotide within a nucleic acid, without generating a large number of insertions or deletions (i.e., indels) in the target nucleotide sequence. In certain embodiments, any of the base editors provided herein are capable of generating a greater proportion of intended modifications (e.g., point mutations or deaminations) versus indels.

[0631] In some embodiments, any of base editor systems provided herein result in less than 50%, less than 40%, less than 30%, less than 20%, less than 19%, less than 18%, less than 17%, less than 16%, less than 15%, less than 14%, less than 13%, less than 12%, less than 11%, less than 10%, less than 9%, less than 8%, less than 7%, less than 6%, less than 5%, less than 4%, less than 3%, less than 2%, less than 1%, less than 0.9%, less than 0.8%, less than 0.7%, less than 0.6%, less than 0.5%, less than 0.4%, less than 0.3%, less than 0.2%, less than 0.1%, less than 0.09%, less than 0.08%, less than 0.07%, less than 0.06%, less than 0.05%, less than 0.04%, less than 0.03%, less than 0.02%, or less than 0.01% indel formation in the target polynucleotide sequence.

[0632] Some aspects of the disclosure are based on the recognition that any of the base editors provided herein are capable of efficiently generating an intended mutation, such as a point mutation, in a nucleic acid (e.g., a nucleic acid within a genome of a subject) without generating a significant number of unintended mutations, such as unintended point mutations. In some embodiments, any of the base editors provided herein are capable of generating at least 0.01% of intended mutations (i.e. at least 0.01% base editing efficiency). In some embodiments, any of the base editors provided herein are capable of generating at least 0.01%, 1%, 2%, 3%, 4%, 5%, 10%, 15%, 20%, 25%, 30%, 40%, 45%, 50%, 60%, 70%, 80%, 90%, 95%, or 99% of intended mutations.

[0633] In some embodiments, the base editors provided herein are capable of generating a ratio of intended point mutations to indels that is greater than 1:1. In some embodiments, the base editors provided herein are capable of generating a ratio of intended point mutations to indels that is at least 1.5:1, at least 2:1, at least 2.5:1, at least 3:1, at least 3.5:1, at least 4:1, at least 4.5:1, at least 5:1, at least 5.5:1, at least 6:1, at least 6.5:1, at least 7:1, at least 7.5:1, at least 8:1, at least 8.5:1, at least 9:1, at least 10:1, at least 11:1, at least 12:1, at least 13:1, at least 14:1, at least 15:1, at least 20:1, at least 25:1, at least 30:1, at least 40:1, at least 50:1, at least 100:1, at least 200:1, at least 300:1, at least 400:1, at least 500:1, at least 600:1, at least 700:1, at least 800:1, at least 900:1, or at least 1000:1, or more.

[0634] The number of intended mutations and indels can be determined using any suitable method, for example, as described in International PCT Application Nos. PCT/2017/045381 (WO2018/027078) and PCT/US2016/058344 (WO2017/070632); Komor, A. C., et al., “Programmable editing of a target base in genomic DNA without double-stranded DNA cleavage” Nature 533, 420-424 (2016); Gaudelli, N. M., et al., “Programmable base editing of A⋅T to G⋅C in genomic DNA without DNA cleavage” Nature 551, 464-471 (2017); and Komor, A. C., et al., “Improved base excision repair inhibition and bacteriophage Mu Gam protein yields C:G-to-T:A base editors with higher efficiency and product purity” Science Advances 3:eaao4774 (2017); the entire contents of which are hereby incorporated by reference.

[0635] In some embodiments, to calculate indel frequencies, sequencing reads are scanned for exact matches to two 10-bp sequences that flank both sides of a window in which indels can occur. If no exact matches are located, the read is excluded from analysis. If the length of this indel window exactly matches the reference sequence the read is classified as not containing an indel. If the indel window is two or more bases longer or shorter than the reference sequence, then the sequencing read is classified as an insertion or deletion, respectively. In some embodiments, the base editors provided herein can limit formation of indels in a region of a nucleic acid. In some embodiments, the region is at a nucleotide targeted by a base editor or a region within 2, 3, 4, 5, 6, 7, 8, 9, or 10 nucleotides of a nucleotide targeted by a base editor.

[0636] The number of indels formed at a target nucleotide region can depend on the amount of time a nucleic acid (e.g., a nucleic acid within the genome of a cell) is exposed to a base editor. In some embodiments, the number or proportion of indels is determined after at least 1 hour, at least 2 hours, at least 6 hours, at least 12 hours, at least 24 hours, at least 36 hours, at least 48 hours, at least 3 days, at least 4 days, at least 5 days, at least 7 days, at least 10 days, or at least 14 days of exposing the target nucleotide sequence (e.g., a nucleic acid within the genome of a cell) to a base editor. It should be appreciated that the characteristics of the base editors as described herein can be applied to any of the fusion proteins, or methods of using the fusion proteins provided herein.

### Multiplex Editing

[0637] In some embodiments, the base editor system provided herein is capable of multiplex editing of a plurality of nucleobase pairs in one or more genes. In some embodiments, the plurality of nucleobase pairs is located in the same gene. In some embodiments, the plurality of nucleobase pairs is located in one or more gene, wherein at least one gene is located in a different locus. In some embodiments, the multiplex editing can comprise one or more guide polynucleotides. In some embodiments, the multiplex editing can comprise one or more base editor system. In some embodiments, the multiplex editing can comprise one or more base editor systems with a single guide polynucleotide. In some embodiments, the multiplex editing can comprise one or more base editor system with a plurality of guide polynucleotides. In some embodiments, the multiplex editing can comprise one or more guide polynucleotide with a single base editor system. In some embodiments, the multiplex editing can comprise at least one guide polynucleotide that does not require a PAM sequence to target binding to a target polynucleotide sequence. In some embodiments, the multiplex editing can comprise at least one guide polynucleotide that requires a PAM sequence to target binding to a target polynucleotide sequence. In some embodiments, the multiplex editing can comprise a mix of at least one guide polynucleotide that does not require a PAM sequence to target binding to a target polynucleotide sequence and at least one guide polynucleotide that require a PAM sequence to target binding to a target polynucleotide sequence. It should be appreciated that the characteristics of the multiplex editing using any of the base editors as described herein can be applied to any of combination of the methods of using any of the base editor provided herein. It should also be appreciated that the multiplex editing using any of the base editors as described herein can comprise a sequential editing of a plurality of nucleobase pairs.

[0638] In some embodiments, the plurality of nucleobase pairs are in one more genes. In some embodiments, the plurality of nucleobase pairs is in the same gene. In some embodiments, at least one gene in the one more genes is located in a different locus.

[0639] In some embodiments, the editing is editing of the plurality of nucleobase pairs in at least one protein coding region. In some embodiments, the editing is editing of the plurality of nucleobase pairs in at least one protein non-coding region. In some embodiments, the editing is editing of the plurality of nucleobase pairs in at least one protein coding region and at least one protein non-coding region.

[0640] In some embodiments, the editing is in conjunction with one or more guide polynucleotides. In some embodiments, the base editor system can comprise one or more base editor system. In some embodiments, the base editor system can comprise one or more base editor systems in conjunction with a single guide polynucleotide. In some embodiments, the base editor system can comprise one or more base editor system in conjunction with a plurality of guide polynucleotides. In some embodiments, the editing is in conjunction with one or more guide polynucleotide with a single base editor system. In some embodiments, the editing is in conjunction with at least one guide polynucleotide that does not require a PAM sequence to target binding to a target polynucleotide sequence. In some embodiments, the editing is in conjunction with at least one guide polynucleotide that require a PAM sequence to target binding to a target polynucleotide sequence. In some embodiments, the editing is in conjunction with a mix of at least one guide polynucleotide that does not require a PAM sequence to target binding to a target polynucleotide sequence and at least one guide polynucleotide that require a PAM sequence to target binding to a target polynucleotide sequence. It should be appreciated that the characteristics of the multiplex editing using any of the base editors as described herein can be applied to any of combination of the methods of using any of the base editors provided herein. It should also be appreciated that the editing can comprise a sequential editing of a plurality of nucleobase pairs.

### Methods of Using Base Editors

[0641] The editing of SDS-associated genes to permit transcription opens up new strategies for gene editing with applications in therapeutics and basic research.

[0642] The present disclosure provides methods for the treatment of a subject diagnosed with a disease (e.g., SDS) associated with or caused by gene conversion, as well as by point mutations that affect splicing (e.g., alter a splice donor or acceptor site) that can be corrected by a base editor system provided herein. For example, in some embodiments, a method is provided that comprises administering to a subject having such a disease, e.g., a disease caused by a gene conversion or other genetic mutation, an effective amount of a nucleobase editor (e.g., an adenosine deaminase base editor or a cytidine deaminase base editor) that edits the gene conversion such that splicing is permitted or that edits another mutation in the disease associated genes a (e.g., converts a stop codon to a missense mutation, inserts a splice acceptor or donor site, or corrects a splice donor or acceptor site comprising a mutation).

[0643] In a certain aspect, methods are provided for the treatment of SDS, which is associated or caused by a mutation (e.g., gene conversion) in the SBDS (including an SBDSP) gene encoding the SBDS protein, which results in aberrant gene splicing and/or premature protein truncation. The effects of gene conversion can be ameliorated by deaminase-mediated gene editing, which introduces, for example, a point mutation that permits transcription or permits normal splicing.

[0644] It will be understood that the numbering of the specific positions or residues in the respective sequences, e.g., polynucleotide or amino acid sequences of a disease-related gene or its encoded protein, respectively, depends on the particular protein and numbering scheme used. Numbering can be different, e.g., in precursors of a mature protein and the mature protein itself, and differences in sequences from species to species can affect numbering. One of skill in the art will be able to identify the respective residue in any homologous protein and in the respective encoding nucleic acid by methods well known in the art, e.g., by sequence alignment and determination of homologous residues.

[0645] Provided herein are methods of using the base editor or base editor system for editing a nucleobase in a target nucleotide sequence associated with a disease or disorder. In some embodiments, the activity of the base editor (e.g., comprising an adenosine deaminase and a Cas9 domain) results in editing of a gene conversion or correction of a point mutation (e.g., a mutation that alters a splice acceptor or donor site). In some embodiments, the target DNA sequence comprises a G→A point mutation associated with a disease or disorder, and wherein the deamination of the mutant A base results in a sequence that is not associated with a disease or disorder. In some embodiments, the target DNA sequence comprises a T→C point mutation associated with a disease or disorder, and wherein the deamination of the mutant C base results in a sequence that is not associated with a disease or disorder. In other embodiments, the target DNA sequence has been altered by a gene conversion event that disrupts splicing, and the deamination of a site within the gene conversion permits transcription and splicing.

[0646] In some embodiments, the target DNA sequence encodes a protein (e.g., SBDS protein), and the point mutation is in a codon and results in a change in the amino acid encoded by the mutant codon as compared to the wild-type codon. In some embodiments, the deamination of the mutant A results in a change of the amino acid encoded by the mutant codon. In some embodiments, the deamination of the mutant A results in the codon encoding the wild-type amino acid. In some embodiments, the deamination of the mutant C results in a change of the amino acid encoded by the mutant codon. In some embodiments, the deamination of the mutant C results in the codon encoding the wild-type amino acid. In some embodiments, the subject has or has been diagnosed with a disease or disorder.

[0647] In some embodiments, the adenosine deaminases provided herein are capable of deaminating adenine of a deoxyadenosine residue of DNA. Other aspects of the disclosure provide fusion proteins that comprise an adenosine deaminase (e.g., an adenosine deaminase that deaminates deoxyadenosine in DNA as described herein) and a domain (e.g., a Cas9 or a Cpf1 protein) capable of binding to a specific nucleotide sequence. For example, the adenosine can be converted to an inosine residue, which typically base pairs with a cytosine residue. Such fusion proteins are useful inter alia for targeted editing of nucleic acid sequences. Such fusion proteins can be used for targeted editing of DNA in vitro, e.g., for the generation of mutant cells or animals; for the introduction of targeted mutations, e.g., for the correction or editing of genetic defects in cells ex vivo, e.g., in cells obtained from a subject that are subsequently re-introduced into the same or another subject; and for the introduction of targeted mutations in vivo, e.g., the editing of genetic defects to permit transcription can be treated using the nucleobase editors provided herein. The present disclosure provides deaminases, fusion proteins, nucleic acids, vectors, cells, compositions, methods, kits, systems, etc. that utilize the deaminases and nucleobase editors.

### Generating an Intended Mutation

[0648] In some embodiments, the purpose of the methods provided herein is to restore the function of a dysfunctional gene via gene editing. In some embodiments, the function of a dysfunctional gene is restored by introducing an intended mutation that permits splicing. The nucleobase editing proteins provided herein can be validated for gene editing-based human therapeutics in vitro, e.g., by editing a disease-associated mutation (e.g., gene conversion) in human cell culture. It will be understood by the skilled artisan that the nucleobase editing proteins provided herein, e.g., the fusion proteins comprising a polynucleotide programmable nucleotide binding domain (e.g., Cas9) and a nucleobase editing domain (e.g., an adenosine deaminase domain or a cytidine deaminase domain) can be used to correct any single point A to G or C to T mutation. In the first case, deamination of the mutant A to I corrects the mutation, and in the latter case, deamination of the A that is base-paired with the mutant T, followed by a round of replication, corrects the mutation. In some embodiments, the editing does not produce a correction, but introduces an alteration that permits transcription.

[0649] In some embodiments, the present disclosure provides base editors that can efficiently generate an intended mutation, such as a point mutation, in a nucleic acid (e.g., a nucleic acid within a genome of a subject) without generating a significant number of unintended mutations, such as unintended point mutations. In some embodiments, an intended mutation is a mutation that is generated by a specific base editor (e.g., cytidine base editor or adenosine base editor) bound to a guide polynucleotide (e.g., gRNA), specifically designed to generate the intended mutation. In some embodiments, the intended mutation is a mutation associated with a disease or disorder. In some embodiments, the intended mutation is an adenine (A) to guanine (G) point mutation associated with a disease or disorder. In some embodiments, the intended mutation is a cytosine (C) to thymine (T) point mutation associated with a disease or disorder. In some embodiments, the intended mutation is an adenine (A) to guanine (G) point mutation within the coding region or non-coding region of a gene. In some embodiments, the intended mutation is a cytosine (C) to thymine (T) point mutation within the coding region or non-coding region of a gene. In some embodiments, the intended mutation is a point mutation that generates a stop codon, for example, a premature stop codon within the coding region of a gene. In some embodiments, the intended mutation is a mutation that eliminates a stop codon.

[0650] In some embodiments, any of the base editors provided herein are capable of generating a ratio of intended mutations to unintended mutations (e.g., intended point mutations:unintended point mutations) that is greater than 1:1. In some embodiments, any of the base editors provided herein are capable of generating a ratio of intended mutations to unintended mutations (e.g., intended point mutations:unintended point mutations) that is at least 1.5:1, at least 2:1, at least 2.5:1, at least 3:1, at least 3.5:1, at least 4:1, at least 4.5:1, at least 5:1, at least 5.5:1, at least 6:1, at least 6.5:1, at least 7:1, at least 7.5:1, at least 8:1, at least 10:1, at least 12:1, at least 15:1, at least 20:1, at least 25:1, at least 30:1, at least 40:1, at least 50:1, at least 100:1, at least 150:1, at least 200:1, at least 250:1, at least 500:1, or at least 1000:1, or more

[0651] Details of base editor efficiency are described in International PCT Application Nos. PCT/2017/045381 (WO2018/027078) and PCT/US2016/058344 (WO2017/070632), each of which is incorporated herein by reference for its entirety. Also see Komor, A. C., et al., “Programmable editing of a target base in genomic DNA without double-stranded DNA cleavage” Nature 533, 420-424 (2016); Gaudelli, N. M., et al., “Programmable base editing of A⋅T to G⋅C in genomic DNA without DNA cleavage” Nature 551, 464-471 (2017); and Komor, A. C., et al., “Improved base excision repair inhibition and bacteriophage Mu Gam protein yields C:G-to-T:A base editors with higher efficiency and product purity” Science Advances 3:eaao4774 (2017), the entire contents of which are hereby incorporated by reference.

[0652] In some embodiments, the editing of the plurality of nucleobase pairs in one or more genes result in formation of at least one intended mutation. In some embodiments, the formation of the at least one intended mutation results in a precise correction of a disease causing mutation. In other embodiments, the editing introduces an alteration that permits transcription of the target gene. Such alteration includes insertion of a splice donor or acceptor site, introduction of a missense mutation that alters a stop codon and permits transcription, or correction or introduction of a splice codon. It should be appreciated that the characteristics of the multiplex editing of the base editors as described herein can be applied to any combination of the methods of using the base editor provided herein.

### Editing of Pathogenic Mutations in an SBDS Polynucleotide

[0653] In one embodiment, the intended mutation alters a stop codon introduced by a gene conversion event, which stop codon results in the premature truncation of the SBDS polypeptide, and introduces a point mutation that is permissive for transcription. In another embodiment, the point mutation introduces a new splice acceptor or splice donor site that restores splicing of an SBDS gene that has undergone gene conversion or that comprises a point mutation that causes aberrant splicing. In some embodiments, the insertion of a new splice acceptor or splice donor site does not restore normal splicing, but nevertheless permits expression of an SBDS protein having wild-type activity or having sufficient activity to have a therapeutic effect when expressed in the cells of a subject having or at risk of developing SDS.

[0654] In some embodiments, the intended mutation is a precise correction of a pathogenic mutation or a disease-causing mutation in a splice site (e.g., donor or acceptor) in the SBDS gene associated with SDS. In some embodiments, the pathogenic mutation is a G→A point mutation associated with a disease or disorder, wherein the deamination of the mutant A base with an A-to-G base editor (ABE) results in a sequence that is not associated with a disease or disorder. In some embodiments, the pathogenic mutation is a C→T point mutation. The C→T point mutation can be corrected, for example, by targeting an A-to-G base editor (ABE) to the opposite strand and editing the complement A of the pathogenic T nucleobase. In some embodiments, the pathogenic mutation is a T→C point mutation associated with a disease or disorder, and wherein the deamination of the mutant C base with a C-to-T base editor (BE or CBE) results in a sequence that is not associated with a disease or disorder. In some embodiments, the pathogenic mutation is an A→G point mutation. The A→G point mutation can be corrected, for example, by targeting a CBE to the opposite strand and editing the complement C of the pathogenic G nucleobase. In some embodiments, the mutation is a 258+2T>C mutation in a SBDS gene that causes aberrant splicing and/or a frameshift. In other embodiments, the mutation is a 83-184TA>CT mutation in a SBDS gene that causes aberrant splicing and/or a frameshift.

### Delivery System

[0655] A base editor disclosed herein can be encoded on a nucleic acid that is contained in a viral vector. Viral vectors can include lentivirus, Adenovirus, Retrovirus, and Adeno-associated viruses (AAVs). Viral vectors can be selected based on the application. For example, AAVs are commonly used for gene delivery in vivo due to their mild immunogenicity. Adenoviruses are commonly used as vaccines because of the strong immunogenic response they induce. Packaging capacity of the viral vectors can limit the size of the base editor that can be packaged into the vector. For example, the packaging capacity of the AAVs is ˜4.5 kb including two 145 base inverted terminal repeats (ITRs).

[0656] AAV is a small, single-stranded DNA dependent virus belonging to the parvovirus family. The 4.7 kb wild-type (wt) AAV genome is made up of two genes that encode four replication proteins and three capsid proteins, respectively, and is flanked on either side by 145-bp inverted terminal repeats (ITRs). The virion is composed of three capsid proteins, Vp1, Vp2, and Vp3, produced in a 1:1:10 ratio from the same open reading frame but from differential splicing (Vp1) and alternative translational start sites (Vp2 and Vp3, respectively). Vp3 is the most abundant subunit in the virion and participates in receptor recognition at the cell surface defining the tropism of the virus. A phospholipase domain, which functions in viral infectivity, has been identified in the unique N terminus of Vp1.

[0657] Similar to wt AAV, recombinant AAV (rAAV) utilizes the cis-acting 145-bp ITRs to flank vector transgene cassettes, providing up to 4.5 kb for packaging of foreign DNA. Subsequent to infection, rAAV can express a fusion protein of the invention and persist without integration into the host genome by existing episomally in circular head-to-tail concatemers. Although there are numerous examples of rAAV success using this system, in vitro and in vivo, the limited packaging capacity has limited the use of AAV-mediated gene delivery when the length of the coding sequence of the gene is equal or greater in size than the wt AAV genome.

[0658] The small packaging capacity of AAV vectors makes the delivery of a number of genes that exceed this size and/or the use of large physiological regulatory elements challenging. These challenges can be addressed, for example, by dividing the protein(s) to be delivered into two or more fragments, wherein the N-terminal fragment is fused to a split intein-N and the C-terminal fragment is fused to a split intein-C. These fragments are then packaged into two or more AAV vectors. As used herein, “intein” refers to a self-splicing protein intron (e.g., peptide) that ligates flanking N-terminal and C-terminal exteins (e.g., fragments to be joined). The use of certain inteins for joining heterologous protein fragments is described, for example, in Wood et al., J. Biol. Chem. 289(21); 14512-9 (2014). For example, when fused to separate protein fragments, the inteins IntN and IntC recognize each other, splice themselves out and simultaneously ligate the flanking N- and C-terminal exteins of the protein fragments to which they were fused, thereby reconstituting a full-length protein from the two protein fragments. Other suitable inteins will be apparent to a person of skill in the art.

[0659] A fragment of a fusion protein of the invention can vary in length. In some embodiments, a protein fragment ranges from 2 amino acids to about 1000 amino acids in length. In some embodiments, a protein fragment ranges from about 5 amino acids to about 500 amino acids in length. In some embodiments, a protein fragment ranges from about 20 amino acids to about 200 amino acids in length. In some embodiments, a protein fragment ranges from about 10 amino acids to about 100 amino acids in length. Suitable protein fragments of other lengths will be apparent to a person of skill in the art.

[0660] In some embodiments, a portion or fragment of a nuclease (e.g., Cas9) is fused to an intein. The nuclease can be fused to the N-terminus or the C-terminus of the intein. In some embodiments, a portion or fragment of a fusion protein is fused to an intein and fused to an AAV capsid protein. The intein, nuclease and capsid protein can be fused together in any arrangement (e.g., nuclease-intein-capsid, intein-nuclease-capsid, capsid-intein-nuclease, etc.). In some embodiments, the N-terminus of an intein is fused to the C-terminus of a fusion protein and the C-terminus of the intein is fused to the N-terminus of an AAV capsid protein.

[0661] In one embodiment, dual AAV vectors are generated by splitting a large transgene expression cassette in two separate halves (5′ and 3′ ends, or head and tail), where each half of the cassette is packaged in a single AAV vector (of <5 kb). The re-assembly of the full-length transgene expression cassette is then achieved upon co-infection of the same cell by both dual AAV vectors followed by: (1) homologous recombination (HR) between 5′ and 3′ genomes (dual AAV overlapping vectors); (2) ITR-mediated tail-to-head concatemerization of 5′ and 3′ genomes (dual AAV trans-splicing vectors); or (3) a combination of these two mechanisms (dual AAV hybrid vectors). The use of dual AAV vectors in vivo results in the expression of full-length proteins. The use of the dual AAV vector platform represents an efficient and viable gene transfer strategy for transgenes of >4.7 kb in size.

[0662] The disclosed strategies for designing base editors can be useful for generating base editors capable of being packaged into a viral vector. The use of RNA or DNA viral based systems for the delivery of a base editor takes advantage of highly evolved processes for targeting a virus to specific cells in culture or in the host and trafficking the viral payload to the nucleus or host cell genome. Viral vectors can be administered directly to cells in culture, patients (in vivo), or they can be used to treat cells in vitro, and the modified cells can optionally be administered to patients (ex vivo). Conventional viral based systems could include retroviral, lentivirus, adenoviral, adeno-associated and herpes simplex virus vectors for gene transfer. Integration in the host genome is possible with the retrovirus, lentivirus, and adeno-associated virus gene transfer methods, often resulting in long term expression of the inserted transgene. Additionally, high transduction efficiencies have been observed in many different cell types and target tissues.

[0663] The tropism of a retrovirus can be altered by incorporating foreign envelope proteins, expanding the potential target population of target cells. Lentiviral vectors are retroviral vectors that are able to transduce or infect non-dividing cells and typically produce high viral titers. Selection of a retroviral gene transfer system would therefore depend on the target tissue. Retroviral vectors are comprised of cis-acting long terminal repeats with packaging capacity for up to 6-10 kb of foreign sequence. The minimum cis-acting LTRs are sufficient for replication and packaging of the vectors, which are then used to integrate the therapeutic gene into the target cell to provide permanent transgene expression. Widely used retroviral vectors include those based upon murine leukemia virus (MuLV), gibbon ape leukemia virus (GaLV), Simian Immuno deficiency virus (SIV), human immuno deficiency virus (HIV), and combinations thereof (See, e.g., Buchscher et al., J. Virol. 66:2731-2739 (1992); Johann et al., J. Virol. 66:1635-1640 (1992); Sommnerfelt et al., Virol. 176:58-59 (1990); Wilson et al., J. Virol. 63:2374-2378 (1989); Miller et al., J. Virol. 65:2220-2224 (1991); PCT/US94/05700).

[0664] Retroviral vectors, especially lentiviral vectors, can require polynucleotide sequences smaller than a given length for efficient integration into a target cell. For example, retroviral vectors of length greater than 9 kb can result in low viral titers compared with those of smaller size. In some aspects, a base editor of the present disclosure is of sufficient size so as to enable efficient packaging and delivery into a target cell via a retroviral vector. In some cases, a base editor is of a size so as to allow efficient packing and delivery even when expressed together with a guide nucleic acid and/or other components of a targetable nuclease system.

[0665] In applications where transient expression is preferred, adenoviral based systems can be used. Adenoviral based vectors are capable of very high transduction efficiency in many cell types and do not require cell division. With such vectors, high titer and levels of expression have been obtained. This vector can be produced in large quantities in a relatively simple system. Adeno-associated virus (“AAV”) vectors can also be used to transduce cells with target nucleic acids, e.g., in the in vitro production of nucleic acids and peptides, and for in vivo and ex vivo gene therapy procedures (See, e.g., West et al., Virology 160:38-47 (1987); U.S. Pat. No. 4,797,368; WO 93/24641; Kotin, Human Gene Therapy 5:793-801 (1994); Muzyczka, J. Clin. Invest. 94:1351 (1994). The construction of recombinant AAV vectors is described in a number of publications, including U.S. Pat. No. 5,173,414; Tratschin et al., Mol. Cell. Biol. 5:3251-3260 (1985); Tratschin, et al., Mol. Cell. Biol. 4:2072-2081 (1984); Hermonat & Muzyczka, PNAS 81:6466-6470 (1984); and Samulski et al., J. Virol. 63:03822-3828 (1989).

[0666] A base editor described herein can therefore be delivered with viral vectors. One or more components of the base editor system can be encoded on one or more viral vectors. For example, a base editor and guide nucleic acid can be encoded on a single viral vector. In other cases, the base editor and guide nucleic acid are encoded on different viral vectors. In either case, the base editor and guide nucleic acid can each be operably linked to a promoter and terminator.

[0667] The combination of components encoded on a viral vector can be determined by the cargo size constraints of the chosen viral vector.

### Non-Viral Delivery of Base Editors

[0668] Non-viral delivery approaches for base editors are also available. One important category of non-viral nucleic acid vectors are nanoparticles, which can be organic or inorganic. Nanoparticles are well known in the art. Any suitable nanoparticle design can be used to deliver genome editing system components or nucleic acids encoding such components. For instance, organic (e.g. lipid and/or polymer) nanoparticles can be suitable for use as delivery vehicles in certain embodiments of this disclosure. Exemplary lipids for use in nanoparticle formulations, and/or gene transfer are shown in Table 8 (below).

TABLE 8
Lipids Used for Gene Transfer

| Lipid | Abbreviation | Feature |
|---|---|---|
| 1,2-Dioleoyl-sn-glycero-3-phosphatidylcholine | DOPC | Helper |
| 1,2-Dioleoyl-sn-glycero-3-phosphatidylethanolamine | DOPE | Helper |
| Cholesterol | | Helper |
| N-[1-(2,3-Dioleyloxy)prophyl]N,N,N-trimethylammonium | DOTMA | Cationic |
| chloride | | |
| 1,2-Dioleoyloxy-3-trimethylammonium-propane | DOTAP | Cationic |
| Dioctadecylamidoglycylspermine | DOGS | Cationic |
| N-(3-Aminopropyl)-N,N-dimethyl-2,3-bis(dodecyloxy)-1- | GAP-DLRIE | Cationic |
| propanaminium bromide | | |
| Cetyltrimethylammonium bromide | CTAB | Cationic |
| 6-Lauroxyhexyl omithinate | LHON | Cationic |
| l-(2,3-Dioleoyloxypropyl)-2,4,6-trimethylpyridinium | 2Oc | Cationic |
| 2,3-Dioleyloxy-N-[2(sperminecarboxamido-ethyl]-N,N- | DOSPA | Cationic |
| dimethyl-1-propanaminium trifluoroacetate | | |
| 1,2-Dioleyl-3-trimethylammonium-propane | DOPA | Cationic |
| N-(2-Hydroxyethyl)-N,N-dimethyl-2,3-bis(tetradecyloxy)-1- | MDRIE | Cationic |
| propanaminium bromide | | |
| Dimyristooxypropyl dimethyl hydroxyethyl ammonium bromide | DMRI | Cationic |
| 3p-[N-(N′,N′-Dimethylaminoethane)-carbamoyl]cholesterol | DC-Chol | Cationic |
| Bis-guanidium-tren-cholesterol | BGTC | Cationic |
| l13-Diodeoxy-2-(6-carboxy-spermyl)-propylamide | DOSPER | Cationic |
| Dimethyloctadecylammonium bromide | DDAB | Cationic |
| Dioctadecylamidoglicylspermidin | DSL | Cationic |
| rac-[(2,3-Dioctadecyloxypropyl)(2-hydroxyethyl)]- | CLIP-1 | Cationic |
| dimethylammonium chloride | | |
| rac-[2(2,3-Dihexadecyloxypropyl- | CLIP-6 | Cationic |
| oxymethyloxy)ethyl]trimethylammoniun bromide | | |
| Ethyldimyristoylphosphatidylcholine | EDMPC | Cationic |
| 1,2-Distearyloxy-N,N-dimethyl-3-aminopropane | DSDMA | Cationic |
| 1,2-Dimyristoyl-trimethylammonium propane | DMTAP | Cationic |
| O,O′-Dimyristyl-N-lysyl aspartate | DMKE | Cationic |
| 1,2-Distearoyl-sn-glycero-3-ethylpho sphocholine | DSEPC | Cationic |
| N-Palmitoyl D-erythro-sphingosyl carbamoyl-spermine | CCS | Cationic |
| N-t-Butyl-N0-tetradecyl-3-tetradecylaminopropionamidine | diC14-amidine | Cationic |
| Octadecenolyoxy[ethyl-2-heptadecenyl-3 hydroxyethyl] | DOTIM | Cationic |
| imidazolinium chloride | | |
| N1-Cholesteryloxycarbonyl-3,7-diazanonane-1,9-diamine | CDAN | Cationic |
| 2-(3-[Bis(3-amino-propyl)-amino]propylamino)-N- | RPR209120 | Cationic |
| ditetradecylcarbamoylme-ethyl-acetamide | | |
| 1,2-dilinoleyloxy-3-dimethylaminopropane | DLinDMA | Cationic |
| 2,2-dilinoleyl-4-dimethylaminoethyl-[1,3]-dioxolane | DLin-KC2-DMA | Cationic |
| dilinoleyl-methyl-4-dimethylaminobutyrate | DLin-MC3-DMA | Cationic |

Table 9 lists exemplary polymers for use in gene transfer and/or nanoparticle formulations.

TABLE 9
Polymers Used for Gene Transfer

| Polymer | Abbreviation |
|---|---|
| Poly(ethylene)glycol | PEG |
| Polyethylenimine | PEI |
| Dithiobis(succinimidylpropionate) | DSP |
| Dimethyl-3,3′-dithiobispropionimidate | DTBP |
| Polyethylene imine )biscarbamate | PEIC |
| Poly(L-lysine) | PLL |
| Histidine modified PLL | |
| Poly(N-vinylpyrrolidone) | PVP |
| Poly(propylenimine) | PPI |
| Poly(amidoamine) | PAMAM |
| Poly(amidoethylenimine) | SS-PAEI |
| Triethylenetetramine | TETA |
| Poly(β-aminoester) | |
| Poly(4-hydroxy-L-proline ester) | PHP |
| Poly(allylamine) | |
| Poly(α-[4-aminobutyl]-L-glycolic acid) | PAGA |
| Poly(D,L-lactic-co-glycolic acid) | PLGA |
| Poly(N-ethyl-4-vinylpyridinium bromide) | |
| Poly(phosphazene)s | PPZ |
| Poly(phosphoester)s | PPE |
| Poly(phosphoramidate)s | PPA |
| Poly(N-2-hydroxypropylmethacrylamide) | pHPMA |
| Poly(2-(dimethylamino)ethyl methacrylate) | pDMAEMA |
| Poly(2-aminoethyl propylene phosphate) | PPE-EA |
| Chitosan | |
| Galactosylated chitosan | |
| N-Dodacylated chitosan | |
| Histone | |
| Collagen | D-SPM |
| Dextran-spermine | |

Table 10 summarizes delivery methods for a polynucleotide encoding a fusion protein described herein.

TABLE 10

| | | Delivery into | | | Type of |
|---|---|---|---|---|---|
| | | Non-Dividing | Duration of | Genome | Molecule |
| Delivery | Vector/Mode | Cells | Expression | Integration | Delivered |
| Physical | (e.g.. | YES | Transient | NO | Nucleic Acids |
| | electroporation, | | | | and Proteins |
| | particle gun, | | | | |
| | Calcium | | | | |
| | Phosphate | | | | |
| | transfection | | | | |
| Viral | Retrovirus | NO | Stable | YES | RNA |
| | Lentivirus | YES | Stable | YES/NO with | RNA |
| | | | | modification | |
| | Adenovirus | YES | Transient | NO | DNA |
| | Adeno- | YES | Stable | NO | DNA |
| | Associated | | | | |
| | Virus (AAV) | | | | |
| | Vaccinia Virus | YES | Very | NO | DNA |
| | | | Transient | | |
| | Herpes Simplex | YES | Stable | NO | DNA |
| | Virus | | | | |
| Non-Viral | Cationic | YES | Transient | Depends on | Nucleic Acids |
| | Liposomes | | | what is | and Proteins |
| | | | | delivered | |
| | Polymeric | YES | Transient | Depends on | Nucleic Acids |
| | Nanoparticles | | | what is | and Proteins |
| | | | | delivered | |
| Biological | Attenuated | YES | Transient | NO | Nucleic Acids |
| Non-Viral | Bacteria | | | | |
| Delivery | Engineered | YES | Transient | NO | Nucleic Acids |
| Vehicles | Bacteriophages | | | | |
| | Mammalian | YES | Transient | NO | Nucleic Acids |
| | Virus-like | | | | |
| | Particles | | | | |
| | Biological | YES | Transient | NO | Nucleic Acids |
| | liposomes: | | | | |
| | Erythrocyte | | | | |
| | Ghosts and | | | | |
| | Exosomes | | | | |

[0669] In another aspect, the delivery of genome editing system components or nucleic acids encoding such components, for example, a nucleic acid binding protein such as, for example, Cas9 or variants thereof, and a gRNA targeting a genomic nucleic acid sequence of interest, may be accomplished by delivering a ribonucleoprotein (RNP) to cells. The RNP comprises the nucleic acid binding protein, e.g., Cas9, in complex with the targeting gRNA. RNPs may be delivered to cells using known methods, such as electroporation, nucleofection, or cationic lipid-mediated methods, for example, as reported by Zuris, J. A. et al., 2015, Nat. Biotechnology, 33(1):73-80. RNPs are advantageous for use in CRISPR base editing systems, particularly for cells that are difficult to transfect, such as primary cells. In addition, RNPs can also alleviate difficulties that may occur with protein expression in cells, especially when eukaryotic promoters, e.g., CMV or EF1A, which may be used in CRISPR plasmids, are not well-expressed. Advantageously, the use of RNPs does not require the delivery of foreign DNA into cells. Moreover, because an RNP comprising a nucleic acid binding protein and gRNA complex is degraded over time, the use of RNPs has the potential to limit off-target effects. In a manner similar to that for plasmid based techniques, RNPs can be used to deliver binding protein (e.g., Cas9 variants) and to direct homology directed repair (HDR).

[0670] A promoter used to drive base editor coding nucleic acid molecule expression can include AAV ITR. This can be advantageous for eliminating the need for an additional promoter element, which can take up space in the vector. The additional space freed up can be used to drive the expression of additional elements, such as a guide nucleic acid or a selectable marker. ITR activity is relatively weak, so it can be used to reduce potential toxicity due to over expression of the chosen nuclease.

[0671] Any suitable promoter can be used to drive expression of the base editor and, where appropriate, the guide nucleic acid. For ubiquitous expression, promoters that can be used include CMV, CAG, CBh, PGK, SV40, Ferritin heavy or light chains, etc. For brain or other CNS cell expression, suitable promoters can include: Synapsin1 for all neurons, CaMKIIalpha for excitatory neurons, GAD67 or GAD65 or VGAT for GABAergic neurons, etc. For liver cell expression, suitable promoters include the Albumin promoter. For lung cell expression, suitable promoters can include SP-B. For endothelial cells, suitable promoters can include ICAM. For hematopoietic cells suitable promoters can include IFNbeta or CD45. For Osteoblasts suitable promoters can include OG-2.

[0672] In some cases, a base editor of the present disclosure is of small enough size to allow separate promoters to drive expression of the base editor and a compatible guide nucleic acid within the same nucleic acid molecule. For instance, a vector or viral vector can comprise a first promoter operably linked to a nucleic acid encoding the base editor and a second promoter operably linked to the guide nucleic acid.

[0673] The promoter used to drive expression of a guide nucleic acid can include: Pol III promoters such as U6 or H1 Use of Pol II promoter and intronic cassettes to express gRNA Adeno Associated Virus (AAV).

[0674] A base editor described herein with or without one or more guide nucleic can be delivered using adeno associated virus (AAV), lentivirus, adenovirus or other plasmid or viral vector types, in particular, using formulations and doses from, for example, U.S. Pat. No. 8,454,972 (formulations, doses for adenovirus), U.S. Pat. No. 8,404,658 (formulations, doses for AAV) and U.S. Pat. No. 5,846,946 (formulations, doses for DNA plasmids) and from clinical trials and publications regarding the clinical trials involving lentivirus, AAV and adenovirus. For example, for AAV, the route of administration, formulation and dose can be as in U.S. Pat. No. 8,454,972 and as in clinical trials involving AAV. For Adenovirus, the route of administration, formulation and dose can be as in U.S. Pat. No. 8,404,658 and as in clinical trials involving adenovirus. For plasmid delivery, the route of administration, formulation and dose can be as in U.S. Pat. No. 5,846,946 and as in clinical studies involving plasmids. Doses can be based on or extrapolated to an average 70 kg individual (e.g. a male adult human), and can be adjusted for patients, subjects, mammals of different weight and species. Frequency of administration is within the ambit of the medical or veterinary practitioner (e.g., physician, veterinarian), depending on usual factors including the age, sex, general health, other conditions of the patient or subject and the particular condition or symptoms being addressed. The viral vectors can be injected into the tissue of interest. For cell-type specific base editing, the expression of the base editor and optional guide nucleic acid can be driven by a cell-type specific promoter.

[0675] For in vivo delivery, AAV can be advantageous over other viral vectors. In some cases, AAV allows low toxicity, which can be due to the purification method not requiring ultra-centrifugation of cell particles that can activate the immune response. In some cases, AAV allows low probability of causing insertional mutagenesis because it doesn't integrate into the host genome.

[0676] AAV has a packaging limit of 4.5 or 4.75 Kb. This means disclosed base editor as well as a promoter and transcription terminator can fit into a single viral vector. Constructs larger than 4.5 or 4.75 Kb can lead to significantly reduced virus production. For example, SpCas9 is quite large, the gene itself is over 4.1 Kb, which makes it difficult for packing into AAV. Therefore, embodiments of the present disclosure include utilizing a disclosed base editor which is shorter in length than conventional base editors. In some examples, the base editors are less than 4 kb. Disclosed base editors can be less than 4.5 kb, 4.4 kb, 4.3 kb, 4.2 kb, 4.1 kb, 4 kb, 3.9 kb, 3.8 kb, 3.7 kb, 3.6 kb, 3.5 kb, 3.4 kb, 3.3 kb, 3.2 kb, 3.1 kb, 3 kb, 2.9 kb, 2.8 kb, 2.7 kb, 2.6 kb, 2.5 kb, 2 kb, or 1.5 kb. In some cases, the disclosed base editors are 4.5 kb or less in length.

[0677] An AAV can be AAV1, AAV2, AAV5 or any combination thereof. One can select the type of AAV with regard to the cells to be targeted; e.g., one can select AAV serotypes 1, 2, 5 or a hybrid capsid AAV1, AAV2, AAV5 or any combination thereof for targeting brain or neuronal cells; and one can select AAV4 for targeting cardiac tissue. AAV8 is useful for delivery to the liver. A tabulation of certain AAV serotypes as to these cells can be found in Grimm, D. et al, J. Virol. 82: 5887-5911 (2008)).

[0678] Lentiviruses are complex retroviruses that have the ability to infect and express their genes in both mitotic and post-mitotic cells. The most commonly known lentivirus is the human immunodeficiency virus (HIV), which uses the envelope glycoproteins of other viruses to target a broad range of cell types.

[0679] Lentiviruses can be prepared as follows. After cloning pCasES10 (which contains a lentiviral transfer plasmid backbone), HEK293FT at low passage (p=5) were seeded in a T-75 flask to 50% confluence the day before transfection in DMEM with 10% fetal bovine serum and without antibiotics. After 20 hours, media is changed to OptiMEM (serum-free) media and transfection was done 4 hours later. Cells are transfected with 10 μg of lentiviral transfer plasmid (pCasES10) and the following packaging plasmids: 5 μg of pMD2.G (VSV-g pseudotype), and 7.5 μg of psPAX2 (gag/pol/rev/tat). Transfection can be done in 4 mL OptiMEM with a cationic lipid delivery agent (50 μl Lipofectamine 2000 and 100 ul Plus reagent). After 6 hours, the media is changed to antibiotic-free DMEM with 10% fetal bovine serum. These methods use serum during cell culture, but serum-free methods are preferred.

[0680] Lentivirus can be purified as follows. Viral supernatants are harvested after 48 hours. Supernatants are first cleared of debris and filtered through a 0.45 μm low protein binding (PVDF) filter. They are then spun in an ultracentrifuge for 2 hours at 24,000 rpm. Viral pellets are resuspended in 50 μl of DMEM overnight at 4° C. They are then aliquoted and immediately frozen at −80° C.

[0681] In another embodiment, minimal non-primate lentiviral vectors based on the equine infectious anemia virus (EIAV) are also contemplated. In another embodiment, RetinoStat.RTM., an equine infectious anemia virus-based lentiviral gene therapy vector that expresses angiostatic proteins endostatin and angiostatin that is contemplated to be delivered via a subretinal injection. In another embodiment, use of self-inactivating lentiviral vectors is contemplated.

[0682] Any RNA of the systems, for example a guide RNA or a base editor-encoding mRNA, can be delivered in the form of RNA. Base editor-encoding mRNA can be generated using in vitro transcription. For example, nuclease mRNA can be synthesized using a PCR cassette containing the following elements: T7 promoter, optional kozak sequence (GCCACC), nuclease sequence, and 3′ UTR such as a 3′ UTR from beta globin-polyA tail. The cassette can be used for transcription by T7 polymerase. Guide polynucleotides (e.g., gRNA) can also be transcribed using in vitro transcription from a cassette containing a T7 promoter, followed by the sequence “GG”, and guide polynucleotide sequence.

[0683] To enhance expression and reduce possible toxicity, the base editor-coding sequence and/or the guide nucleic acid can be modified to include one or more modified nucleoside e.g. using pseudo-U or 5-Methyl-C.

[0684] The disclosure in some embodiments encompasses a method of modifying a cell or organism. The cell can be a prokaryotic cell or a eukaryotic cell. The cell can be a mammalian cell. The mammalian cell many be a non-human primate, bovine, porcine, rodent or mouse cell. The modification introduced to the cell by the base editors, compositions and methods of the present disclosure can be such that the cell and progeny of the cell are altered for improved production of biologic products such as an antibody, starch, alcohol or other desired cellular output. The modification introduced to the cell by the methods of the present disclosure can be such that the cell and progeny of the cell include an alteration that changes the biologic product produced.

[0685] The system can comprise one or more different vectors. In an aspect, the base editor is codon optimized for expression the desired cell type, preferentially a eukaryotic cell, preferably a mammalian cell or a human cell.

[0686] In general, codon optimization refers to a process of modifying a nucleic acid sequence for enhanced expression in the host cells of interest by replacing at least one codon (e.g. about or more than about 1, 2, 3, 4, 5, 10, 15, 20, 25, 50, or more codons) of the native sequence with codons that are more frequently or most frequently used in the genes of that host cell while maintaining the native amino acid sequence. Various species exhibit particular bias for certain codons of a particular amino acid. Codon bias (differences in codon usage between organisms) often correlates with the efficiency of translation of messenger RNA (mRNA), which is in turn believed to be dependent on, among other things, the properties of the codons being translated and the availability of particular transfer RNA (tRNA) molecules. The predominance of selected tRNAs in a cell is generally a reflection of the codons used most frequently in peptide synthesis. Accordingly, genes can be tailored for optimal gene expression in a given organism based on codon optimization. Codon usage tables are readily available, for example, at the “Codon Usage Database” available at www.kazusa.orjp/codon/ (visited Jul. 9, 2002), and these tables can be adapted in a number of ways. See, Nakamura, Y., et al. “Codon usage tabulated from the international DNA sequence databases: status for the year 2000” Nucl. Acids Res. 28:292 (2000). Computer algorithms for codon optimizing a particular sequence for expression in a particular host cell are also available, such as Gene Forge (Aptagen; Jacobus, Pa.), are also available. In some embodiments, one or more codons (e.g. 1, 2, 3, 4, 5, 10, 15, 20, 25, 50, or more, or all codons) in a sequence encoding an engineered nuclease correspond to the most frequently used codon for a particular amino acid.

[0687] Packaging cells are typically used to form virus particles that are capable of infecting a host cell. Such cells include 293 cells, which package adenovirus, and psi.2 cells or PA317 cells, which package retrovirus. Viral vectors used in gene therapy are usually generated by producing a cell line that packages a nucleic acid vector into a viral particle. The vectors typically contain the minimal viral sequences required for packaging and subsequent integration into a host, other viral sequences being replaced by an expression cassette for the polynucleotide(s) to be expressed. The missing viral functions are typically supplied in trans by the packaging cell line. For example, AAV vectors used in gene therapy typically only possess ITR sequences from the AAV genome which are required for packaging and integration into the host genome. Viral DNA can be packaged in a cell line, which contains a helper plasmid encoding the other AAV genes, namely rep and cap, but lacking ITR sequences. The cell line can also be infected with adenovirus as a helper. The helper virus can promote replication of the AAV vector and expression of AAV genes from the helper plasmid. The helper plasmid in some cases is not packaged in significant amounts due to a lack of ITR sequences. Contamination with adenovirus can be reduced by, e.g., heat treatment to which adenovirus is more sensitive than AAV.

### Pharmaceutical Compositions

[0688] Other aspects of the present disclosure relate to pharmaceutical compositions comprising any of the base editors, fusion proteins, or the fusion protein-guide polynucleotide complexes described herein. The term “pharmaceutical composition”, as used herein, refers to a composition formulated for pharmaceutical use. In some embodiments, the pharmaceutical composition further comprises a pharmaceutically acceptable carrier. In some embodiments, the pharmaceutical composition comprises additional agents (e.g., for specific delivery, increasing half-life, or other therapeutic compounds).

[0689] As used here, the term “pharmaceutically-acceptable carrier” means a pharmaceutically-acceptable material, composition or vehicle, such as a liquid or solid filler, diluent, excipient, manufacturing aid (e.g., lubricant, talc magnesium, calcium or zinc stearate, or steric acid), or solvent encapsulating material, involved in carrying or transporting the compound from one site (e.g., the delivery site) of the body, to another site (e.g., organ, tissue or portion of the body). A pharmaceutically acceptable carrier is “acceptable” in the sense of being compatible with the other ingredients of the formulation and not injurious to the tissue of the subject (e.g., physiologically compatible, sterile, physiologic pH, etc.).

[0690] Some nonlimiting examples of materials which can serve as pharmaceutically-acceptable carriers include: (1) sugars, such as lactose, glucose and sucrose; (2) starches, such as corn starch and potato starch; (3) cellulose, and its derivatives, such as sodium carboxymethyl cellulose, methylcellulose, ethyl cellulose, microcrystalline cellulose and cellulose acetate; (4) powdered tragacanth; (5) malt; (6) gelatin; (7) lubricating agents, such as magnesium stearate, sodium lauryl sulfate and talc; (8) excipients, such as cocoa butter and suppository waxes; (9) oils, such as peanut oil, cottonseed oil, safflower oil, sesame oil, olive oil, corn oil and soybean oil; (10) glycols, such as propylene glycol; (11) polyols, such as glycerin, sorbitol, mannitol and polyethylene glycol (PEG); (12) esters, such as ethyl oleate and ethyl laurate; (13) agar; (14) buffering agents, such as magnesium hydroxide and aluminum hydroxide; (15) alginic acid; (16) pyrogen-free water; (17) isotonic saline; (18) Ringer's solution; (19) ethyl alcohol; (20) pH buffered solutions; (21) polyesters, polycarbonates and/or polyanhydrides; (22) bulking agents, such as polypeptides and amino acids (23) serum alcohols, such as ethanol; and (23) other non-toxic compatible substances employed in pharmaceutical formulations. Wetting agents, coloring agents, release agents, coating agents, sweetening agents, flavoring agents, perfuming agents, preservative and antioxidants can also be present in the formulation. The terms such as “excipient,” “carrier,” “pharmaceutically acceptable carrier,” “vehicle,” or the like are used interchangeably herein.

[0691] Pharmaceutical compositions can comprise one or more pH buffering compounds to maintain the pH of the formulation at a predetermined level that reflects physiological pH, such as in the range of about 5.0 to about 8.0. The pH buffering compound used in the aqueous liquid formulation can be an amino acid or mixture of amino acids, such as histidine or a mixture of amino acids such as histidine and glycine. Alternatively, the pH buffering compound is preferably an agent which maintains the pH of the formulation at a predetermined level, such as in the range of about 5.0 to about 8.0, and which does not chelate calcium ions. Illustrative examples of such pH buffering compounds include, but are not limited to, imidazole and acetate ions. The pH buffering compound may be present in any amount suitable to maintain the pH of the formulation at a predetermined level.

[0692] Pharmaceutical compositions can also contain one or more osmotic modulating agents, i.e., a compound that modulates the osmotic properties (e.g, tonicity, osmolality, and/or osmotic pressure) of the formulation to a level that is acceptable to the blood stream and blood cells of recipient individuals. The osmotic modulating agent can be an agent that does not chelate calcium ions. The osmotic modulating agent can be any compound known or available to those skilled in the art that modulates the osmotic properties of the formulation. One skilled in the art may empirically determine the suitability of a given osmotic modulating agent for use in the inventive formulation. Illustrative examples of suitable types of osmotic modulating agents include, but are not limited to: salts, such as sodium chloride and sodium acetate; sugars, such as sucrose, dextrose, and mannitol; amino acids, such as glycine; and mixtures of one or more of these agents and/or types of agents. The osmotic modulating agent(s) may be present in any concentration sufficient to modulate the osmotic properties of the formulation.

[0693] In some embodiments, the pharmaceutical composition is formulated for delivery to a subject, e.g., for gene editing. Suitable routes of administrating the pharmaceutical composition described herein include, without limitation: topical, subcutaneous, transdermal, intradermal, intralesional, intraarticular, intraperitoneal, intravesical, transmucosal, gingival, intradental, intracochlear, transtympanic, intraorgan, epidural, intrathecal, intramuscular, intravenous, intravascular, intraosseus, periocular, intratumoral, intracerebral, and intracerebroventricular administration.

[0694] In some embodiments, the pharmaceutical composition described herein is administered locally to a diseased site (e.g., tumor site). In some embodiments, the pharmaceutical composition described herein is administered to a subject by injection, by means of a catheter, by means of a suppository, or by means of an implant, the implant being of a porous, non-porous, or gelatinous material, including a membrane, such as a sialastic membrane, or a fiber.

[0695] In other embodiments, the pharmaceutical composition described herein is delivered in a controlled release system. In one embodiment, a pump can be used (See, e.g., Langer, 1990, Science 249: 1527-1533; Sefton, 1989, CRC Crit. Ref. Biomed. Eng. 14:201; Buchwald et al., 1980, Surgery 88:507; Saudek et al., 1989, N. Engl. J. Med. 321:574). In another embodiment, polymeric materials can be used. (See, e.g., Medical Applications of Controlled Release (Langer and Wise eds., CRC Press, Boca Raton, Fla., 1974); Controlled Drug Bioavailability, Drug Product Design and Performance (Smolen and Ball eds., Wiley, New York, 1984); Ranger and Peppas, 1983, Macromol. Sci. Rev. Macromol. Chem. 23:61. See also Levy et al., 1985, Science 228: 190; During et al., 1989, Ann. Neurol. 25:351; Howard et ah, 1989, J. Neurosurg. 71: 105.) Other controlled release systems are discussed, for example, in Langer, supra.

[0696] In some embodiments, the pharmaceutical composition is formulated in accordance with routine procedures as a composition adapted for intravenous or subcutaneous administration to a subject, e.g., a human. In some embodiments, pharmaceutical composition for administration by injection are solutions in sterile isotonic use as solubilizing agent and a local anesthetic such as lignocaine to ease pain at the site of the injection. Generally, the ingredients are supplied either separately or mixed together in unit dosage form, for example, as a dry lyophilized powder or water free concentrate in a hermetically sealed container such as an ampoule or sachette indicating the quantity of active agent. Where the pharmaceutical is to be administered by infusion, it can be dispensed with an infusion bottle containing sterile pharmaceutical grade water or saline. Where the pharmaceutical composition is administered by injection, an ampoule of sterile water for injection or saline can be provided so that the ingredients can be mixed prior to administration.

[0697] A pharmaceutical composition for systemic administration can be a liquid, e.g., sterile saline, lactated Ringer's or Hank's solution. In addition, the pharmaceutical composition can be in solid forms and re-dissolved or suspended immediately prior to use. Lyophilized forms are also contemplated. The pharmaceutical composition can be contained within a lipid particle or vesicle, such as a liposome or microcrystal, which is also suitable for parenteral administration. The particles can be of any suitable structure, such as unilamellar or plurilamellar, so long as compositions are contained therein. Compounds can be entrapped in “stabilized plasmid-lipid particles” (SPLP) containing the fusogenic lipid dioleoylphosphatidylethanolamine (DOPE), low levels (5-10 mol %) of cationic lipid, and stabilized by a polyethyleneglycol (PEG) coating (Zhang Y. P. et ah, Gene Ther. 1999, 6: 1438-47). Positively charged lipids such as N-[1-(2,3-dioleoyloxi)propyl]-N,N,N-trimethyl-amoniummethylsulfate, or “DOTAP,” are particularly preferred for such particles and vesicles. The preparation of such lipid particles is well known. See, e.g., U.S. Pat. Nos. 4,880,635; 4,906,477; 4,911,928; 4,917,951; 4,920,016; and 4,921,757; each of which is incorporated herein by reference.

[0698] The pharmaceutical composition described herein can be administered or packaged as a unit dose, for example. The term “unit dose” when used in reference to a pharmaceutical composition of the present disclosure refers to physically discrete units suitable as unitary dosage for the subject, each unit containing a predetermined quantity of active material calculated to produce the desired therapeutic effect in association with the required diluent; i.e., carrier, or vehicle.

[0699] Further, the pharmaceutical composition can be provided as a pharmaceutical kit comprising (a) a container containing a compound of the invention in lyophilized form and (b) a second container containing a pharmaceutically acceptable diluent (e.g., sterile used for reconstitution or dilution of the lyophilized compound of the invention. Optionally associated with such container(s) can be a notice in the form prescribed by a governmental agency regulating the manufacture, use or sale of pharmaceuticals or biological products, which notice reflects approval by the agency of manufacture, use or sale for human administration.

[0700] In another aspect, an article of manufacture containing materials useful for the treatment of the diseases described above is included. In some embodiments, the article of manufacture comprises a container and a label. Suitable containers include, for example, bottles, vials, syringes, and test tubes. The containers can be formed from a variety of materials such as glass or plastic. In some embodiments, the container holds a composition that is effective for treating a disease described herein and can have a sterile access port. For example, the container can be an intravenous solution bag or a vial having a stopper pierceable by a hypodermic injection needle. The active agent in the composition is a compound of the invention. In some embodiments, the label on or associated with the container indicates that the composition is used for treating the disease of choice. The article of manufacture can further comprise a second container comprising a pharmaceutically-acceptable buffer, such as phosphate-buffered saline, Ringer's solution, or dextrose solution. It can further include other materials desirable from a commercial and user standpoint, including other buffers, diluents, filters, needles, syringes, and package inserts with instructions for use.

[0701] In some embodiments, any of the fusion proteins, gRNAs, and/or complexes described herein are provided as part of a pharmaceutical composition. In some embodiments, the pharmaceutical composition comprises any of the fusion proteins provided herein. In some embodiments, the pharmaceutical composition comprises any of the complexes provided herein. In some embodiments, the pharmaceutical composition comprises a ribonucleoprotein complex comprising an RNA-guided nuclease (e.g., Cas9) that forms a complex with a gRNA and a cationic lipid. In some embodiments pharmaceutical composition comprises a gRNA, a nucleic acid programmable DNA binding protein, a cationic lipid, and a pharmaceutically acceptable excipient. Pharmaceutical compositions can optionally comprise one or more additional therapeutically active substances.

### Methods of Treating SDS

[0702] Provided also are methods of treating SDS and/or the genetic mutations associated with a SBDS gene conversion, or SBDSP that causes SDS. The methods comprise administering to a subject (e.g., a mammal, such as a human) a therapeutically effective amount of a pharmaceutical composition that comprises a polynucleotide encoding a base editor system (e.g., base editor and gRNA) described herein. In some embodiments, the base editor comprises a polynucleotide programmable DNA binding domain and an adenosine deaminase domain or a cytidine deaminase domain. In some embodiments, the base editor comprises a composition comprising a polynucleotide programmable DNA binding domain and an adenosine deaminase domain or a cytidine deaminase domain. In an embodiment, the base editor comprises a polynucleotide programmable DNA binding domain and a cytidine deaminase domain. In an embodiment, the base editor comprises a composition comprising a polynucleotide programmable DNA binding domain and a cytidine deaminase domain. In some embodiments, the base editor is a fusion protein that comprises a polynucleotide programmable DNA binding domain and an adenosine deaminase domain or a cytidine deaminase domain. A cell of the subject is transduced with the base editor and one or more guide polynucleotides that target the base editor to effect an A⋅T to G⋅C alteration (if the cell is transduced with an adenosine deaminase domain) or a C⋅G to UA alteration (if the cell is transduced with a cytidine deaminase domain) of a nucleic acid sequence containing one or more mutations in the SBDS (e.g., a SBDSP) gene.

[0703] The methods herein include administering to the subject (including a subject identified as being in need of such treatment, or a subject suspected of being at risk of disease and in need of such treatment) an effective amount of a composition described herein. Identifying a subject in need of such treatment can be in the judgment of a subject or a health care professional and can be subjective (e.g. opinion) or objective (e.g. measurable by a test or diagnostic method).

[0704] The therapeutic methods, in general, comprise administration of a therapeutically effective amount of a pharmaceutical composition comprising, for example, a vector encoding a base editor and a gRNA that targets the SBDS or SBDSP gene of a subject (e.g., a human patient) in need thereof. Such treatment will be suitably administered to a subject, particularly a human subject, suffering from, having, susceptible to, or at risk for SDS. The compositions herein may be also used in the treatment of any other disorders in which a mutation in SBDS or a gene encoding SBDS may be implicated.

[0705] In one embodiment, a method of monitoring treatment progress is provided. The method includes the step of determining a level of diagnostic marker (Marker) (e.g., SNP associated with SDS) or diagnostic measurement (e.g., screen, assay) in a subject suffering from or susceptible to a disorder or symptoms thereof associated with SDS in which the subject has been administered a therapeutic amount of a composition herein sufficient to treat the disease or symptoms thereof. The level of Marker determined in the method can be compared to known levels of Marker in either healthy normal controls or in other afflicted patients to establish the subject's disease status. In preferred embodiments, a second level of Marker in the subject is determined at a time point later than the determination of the first level, and the two levels are compared to monitor the course of disease or the efficacy of the therapy. In certain preferred embodiments, a pre-treatment level of Marker in the subject is determined prior to beginning treatment according to this invention; this pre-treatment level of Marker can then be compared to the level of Marker in the subject after the treatment commences, to determine the efficacy of the treatment.

[0706] In some embodiments, compositions provided herein are administered to a subject, for example, to a human subject, in order to effect a targeted genomic modification within the subject. In some embodiments, cells are obtained from the subject and contacted with any of the pharmaceutical compositions provided herein. In some embodiments, cells removed from a subject and contacted ex vivo with a pharmaceutical composition are re-introduced into the subject, optionally after the desired genomic modification has been effected or detected in the cells. Methods of delivering pharmaceutical compositions comprising nucleases are known, and are described, for example, in U.S. Pat. Nos. 6,453,242; 6,503,717; 6,534,261; 6,599,692; 6,607,882; 6,689,558; 6,824,978; 6,933,113; 6,979,539; 7,013,219; and 7,163,824, the disclosures of all of which are incorporated by reference herein in their entireties. Although the descriptions of pharmaceutical compositions provided herein are principally directed to pharmaceutical compositions which are suitable for administration to humans, it will be understood by the skilled artisan that such compositions are generally suitable for administration to animals or organisms of all sorts, for example, for veterinary use.

[0707] Modification of pharmaceutical compositions suitable for administration to humans in order to render the compositions suitable for administration to various animals is well understood, and the ordinarily skilled veterinary pharmacologist can design and/or perform such modification with merely ordinary, if any, experimentation. Subjects to which administration of the pharmaceutical compositions is contemplated include, but are not limited to, humans and/or other primates; mammals, domesticated animals, pets, and commercially relevant mammals such as cattle, pigs, horses, sheep, cats, dogs, mice, and/or rats; and/or birds, including commercially relevant birds such as chickens, ducks, geese, and/or turkeys.

[0708] Formulations of the pharmaceutical compositions described herein can be prepared by any method known or hereafter developed in the art of pharmacology. In general, such preparatory methods include the step of bringing the active ingredient(s) into association with an excipient and/or one or more other accessory ingredients, and then, if necessary and/or desirable, shaping and/or packaging the product into a desired single- or multi-dose unit. Pharmaceutical formulations can additionally comprise a pharmaceutically acceptable excipient, which, as used herein, includes any and all solvents, dispersion media, diluents, or other liquid vehicles, dispersion or suspension aids, surface active agents, isotonic agents, thickening or emulsifying agents, preservatives, solid binders, lubricants and the like, as suited to the particular dosage form desired. Remington's The Science and Practice of Pharmacy, 21st Edition, A. R. Gennaro (Lippincott, Williams & Wilkins, Baltimore, Md., 2006; incorporated in its entirety herein by reference) discloses various excipients used in formulating pharmaceutical compositions and known techniques for the preparation thereof. See also PCT application PCT/US2010/055131 (Publication number WO2011/053982 A8, filed Nov. 2, 2010), incorporated in its entirety herein by reference, for additional suitable methods, reagents, excipients and solvents for producing pharmaceutical compositions comprising a nuclease.

[0709] Except insofar as any conventional excipient medium is incompatible with a substance or its derivatives, such as by producing any undesirable biological effect or otherwise interacting in a deleterious manner with any other component(s) of the pharmaceutical composition, its use is contemplated to be within the scope of this disclosure.

[0710] The compositions, as described above, can be administered in effective amounts. The effective amount will depend upon the mode of administration, the particular condition being treated, and the desired outcome. It may also depend upon the stage of the condition, the age and physical condition of the subject, the nature of concurrent therapy, if any, and like factors well-known to the medical practitioner. For therapeutic applications, it is that amount sufficient to achieve a medically desirable result.

### Kits

[0711] Various aspects of this disclosure provide kits comprising a base editor system. In one embodiment, the kit comprises a nucleic acid construct comprising a nucleotide sequence encoding a nucleobase editor fusion protein. The fusion protein comprises a deaminase (e.g., cytidine deaminase or adenine deaminase) and a nucleic acid programmable DNA binding protein (napDNAbp). In some embodiments, the kit comprises at least one guide RNA capable of targeting a nucleic acid molecule of interest, e.g., SDS-associated mutations. In some embodiments, the kit comprises a nucleic acid construct comprising a nucleotide sequence encoding at least one guide RNA.

[0712] The kit provides, in some embodiments, instructions for using the kit to edit one or more SDS-associated mutations. The instructions will generally include information about the use of the kit for editing nucleic acid molecules. In other embodiments, the instructions include at least one of the following: precautions; warnings; clinical studies; and/or references. The instructions may be printed directly on the container (when present), or as a label applied to the container, or as a separate sheet, pamphlet, card, or folder supplied in or with the container. In a further embodiment, a kit can comprise instructions in the form of a label or separate insert (package insert) for suitable operational parameters. In yet another embodiment, the kit can comprise one or more containers with appropriate positive and negative controls or control samples, to be used as standard(s) for detection, calibration, or normalization. The kit can further comprise a second container comprising a pharmaceutically-acceptable buffer, such as (sterile) phosphate-buffered saline, Ringer's solution, or dextrose solution. It can further include other materials desirable from a commercial and user standpoint, including other buffers, diluents, filters, needles, syringes, and package inserts with instructions for use.

[0713] In certain embodiments, the kit is useful for the treatment of a subject having Shwachman Diamond Syndrome (SDS).

### EXAMPLES

[0714] The following examples are provided for illustrative purposes only and are not intended to limit the scope of the claims provided herein.

### Example 1 PAM Variant Validation in Base Editors

[0715] Novel CRISPR systems and PAM variants enable base editors (e.g., PV1-PV28) to edit mutations (e.g., gene conversions that disrupt splicing) present in an SBDS polynucleotide (e.g., SBDSP polynucleotide). Several novel PAM variants have been evaluated and validated. Details of PAM evaluations and base editors are described, for example, in International PCT Application Nos. PCT/2017/045381 (WO2018/027078) and PCT/US2016/058344 (WO2017/070632), each of which is incorporated herein by reference in its entirety. Also see Komor, A. C., et al., “Programmable editing of a target base in genomic DNA without double-stranded DNA cleavage” Nature 533, 420-424 (2016); Gaudelli, N. M., et al., “Programmable base editing of A⋅T to G⋅C in genomic DNA without DNA cleavage” Nature 551, 464-471 (2017); and Komor, A. C., et al., “Improved base excision repair inhibition and bacteriophage Mu Gam protein yields C:G-to-T:A base editors with higher efficiency and product purity” Science Advances 3:eaao4774 (2017), the entire contents of each of which are hereby incorporated by reference.

### Example 2 Gene Editing to Correct Aberrant Splicing Associated with Shwachman Diamond Syndrome (SDS)

[0716] Mutations associated with SDS include a TA→CT dinucleotide change at position 183-184 and a 258+2T→C change (FIGS. 1A and 1B). The mutation 258+2T→C is predicted to disrupt the donor splice site of intron 2, and the observed 8-bp deletion is consistent with use of an upstream cryptic splice donor site at position 251-252. The dinucleotide alteration 183-184TA→CT introduces an in-frame stop codon (K62X), and 258+2T→C and the resultant 8-bp deletion cause premature truncation of the encoded protein by frameshift (84Cfs3).

[0717] Pathogenic mutations in the SBDS gene that result in aberrant splicing are associated with Shwachman Diamond Syndrome. As shown in FIG. 2A and FIG. 2B, aberrant splicing mutations are corrected using a base editor having adenosine deaminase or cytidine deaminase activity and the requisite PAM specificity, using the gRNAs at Table 11.

TABLE 11
Guide RNAs for Editing Pathogenic SBDS

| Guide RNA Sequence and (Editor) | Location/Mutation | PAM |
|---|---|---|
| 5′-GUAAGCAGGCGGGUAACAGC-3′ | rs113993993 258 + 2T > C | NGC |
| (CBE) | | |
| 5′-AGCAGGCGGGUAACAGCUGC-3′ | rs113993993 258 + 2T > C | NGC |
| (CBE) | | |
| 5′-GCGGGUAACAGCUGCAGCAU-3′ | rs113993993 258 + 2T > C | NGC |
| (CBE) | | |
| 5′-UGUAAAUGUUUCCUAAGGUC-3′ | 183-184TA > CT Rs113993991 | NGC |
| (ABE) | | |
| 5′-AAUGUUUCCUAAGGUCAGGU-3′ | 183-184TA > CT Rs113993991 | NGG |
| (ABE) | | |

[0718] A 183-184TA>CT Rs113993991 results in a stop codon (TAA), which is shown in FIG. 2A. An ABE selected from among PV1-14 is used to introduce convert TAA to TGG, which encodes Tryptophan. Such conversion would permit transcription of a protein having a Trp (W) in place of a Lys (K) at amino acid position 62.

[0719] Base Editors (PV1-14) are used in conjunction with the gRNAs depicted in FIG. 2A to edit an SBDS gene comprising an alteration (e.g., gene conversion). Editors PV 1-14 are used to edit an SBDS gene using a guide RNA having any of the following sequences:

5′-UGUAAAUGUUUCCUAAGGUC-3′
5′-AAUGUUUCCUAAGGUCAGGU-3′.

[0720] A description of the editors (PV1-14) useful for correction of SDS-associated mutations (e.g., gene conversion) follows:

PV1. pCMV_monoABE8.1_bpNLS + Y147T
MSEVEFSHEYWMRHALTLAKRARDEREVPVGAVLVLNNRVIGEGWNRAIGLHDPTAHAEIMA
LRQGGLVMQNYRLIDATLYVTFEPCVMCAGAMIHSRIGRVVFGVRNAKTGAAGSLMDVLHYP
GMNHRVEITEGILADECAALLCTFFRMPRQVFNAQKKAQSSTD
PV2. pCMV_monoABE8.1_bpNLS + Y147R
MSEVEFSHEYWMRHALTLAKRARDEREVPVGAVLVLNNRVIGEGWNRAIGLHDPTAHAEIMA
LRQGGLVMQNYRLIDATLYVTFEPCVMCAGAMIHSRIGRVVFGVRNAKTGAAGSLMDVLHYP
GMNHRVEITEGILADECAALLCRFFRMPRQVFNAQKKAQSSTD
PV3 pCMV_monoABE8.1_bpNLS + Q154S
MSEVEFSHEYWMRHALTLAKRARDEREVPVGAVLVLNNRVIGEGWNRAIGLHDPTAHAEIMA
LRQGGLVMQNYRLIDATLYVTFEPCVMCAGAMIHSRIGRVVFGVRNAKTGAAGSLMDVLHYP
GMNHRVEITEGILADECAALLCYFFRMPRSVFNAQKKAQSSTD
PV4 pCMV_monoABE8.1_bpNLS + Y123H
MSEVEFSHEYWMRHALTLAKRARDEREVPVGAVLVLNNRVIGEGWNRAIGLHDPTAHAEIMA
LRQGGLVMQNYRLIDATLYVTFEPCVMCAGAMIHSRIGRVVFGVRNAKTGAAGSLMDVLHHP
GMNHRVEITEGILADECAALLCYFFRMPRQVFNAQKKAQSSTD
PV5 pCMV_monoABE8.1_bpNLS + V82S
MSEVEFSHEYWMRHALTLAKRARDEREVPVGAVLVLNNRVIGEGWNRAIGLHDPTAHAEIMA
LRQGGLVMQNYRLIDAILYSTFEPCVMCAGAMIHSRIGRVVFGVRNAKTGAAGSLMDVLHYP
GMNHRVEITEGILADECAALLCYFFRMPRQVFNAQKKAQSSTD
PV6 pCMV_monoABE8.1_bpNLS + T166R
MSEVEFSHEYWMRHALTLAKRARDEREVPVGAVLVLNNRVIGEGWNRAIGLHDPTAHAEIMA
LRQGGLVMQNYRLIDATLYVTFEPCVMCAGAMIHSRIGRVVFGVRNAKTGAAGSLMDVLHYP
GMNHRVEITEGILADECAALLCYFFRMPRQVFNAQKKAQSSRD
PV7 (pCMV_monoABE8.1_bpNLS + Q154R
MSEVEFSHEYWMRHALTLAKRARDEREVPVGAVLVLNNRVIGEGWNRAIGLHDPTAHAEIMA
LRQGGLVMQNYRLIDATLYVTFEPCVMCAGAMIHSRIGRVVFGVRNAKTGAAGSLMDVLHYP
GMNHRVEITEGILADECAALLCYFFRMPRRVFNAQKKAQSSTD
PV8 pCMV_monoABE8.1_bpNLS + Y147R_Q154R_Y123H
MSEVEFSHEYWMRHALTLAKRARDEREVPVGAVLVLNNRVIGEGWNRAIGLHDPTAHAEIMA
LRQGGLVMQNYRLIDATLYVTFEPCVMCAGAMIHSRIGRVVFGVRNAKTGAAGSLMDVLHHP
GMNHRVEITEGILADECAALLCRFFRMPRRVFNAQKKAQSSTD
PV9 pCMV_monoABE8.1_bpNLS + Y147R_Q154R_I76Y
MSEVEFSHEYWMRHALTLAKRARDEREVPVGAVLVLNNRVIGEGWNRAIGLHDPTAHAEIMA
LRQGGLVMQNYRLYDATLYVTFEPCVMCAGAMIHSRIGRVVFGVRNAKTGAAGSLMDVLHYP
GMNHRVEITEGILADECAALLCRFFRMPRRVFNAQKKAQSSTD
PV10 pCMV_monoABE8.1_bpNLS + Y147R_Q154R_T166R
MSEVEFSHEYWMRHALTLAKRARDEREVPVGAVLVLNNRVIGEGWNRAIGLHDPTAHAEIMA
LRQGGLVMQNYRLIDATLYVTFEPCVMCAGAMIHSRIGRVVFGVRNAKTGAAGSLMDVLHYP
GMNHRVEITEGILADECAALLCRFFRMPRRVFNAQKKAQSSRD
PV11 pCMV_monoABE8.1_bpNLS + Y147T_Q154R
MSEVEFSHEYWMRHALTLAKRARDEREVPVGAVLVLNNRVIGEGWNRAIGLHDPTAHAEIMA
LRQGGLVMQNYRLIDATLYVTFEPCVMCAGAMIHSRIGRVVFGVRNAKTGAAGSLMDVLHYP
GMNHRVEITEGILADECAALLCTFFRMPRRVFNAQKKAQSSTD
PV12 pCMV_monoABE8.1_bpNLS + Y147T_Q154S
MSEVEFSHEYWMRHALTLAKRARDEREVPVGAVLVLNNRVIGEGWNRAIGLHDPTAHAEIMA
LRQGGLVMQNYRLIDATLYVTFEPCVMCAGAMIHSRIGRVVFGVRNAKTGAAGSLMDVLHYP
GMNHRVEITEGILADECAALLCTFFRMPRSVFNAQKKAQSSTD
PV13 pCMV_monoABE8.1_bpNLS + H123Y123H_Y147R_Q154R_176Y
MSEVEFSHEYWMRHALTLAKRARDEREVPVGAVLVLNNRVIGEGWNRAIGLHDPTAHAEIMA
LRQGGLVMQNYRLYDATLYVTFEPCVMCAGAMIHSRIGRVVFGVRNAKTGAAGSLMDVLHHP
GMNHRVEITEGILADECAALLCRFFRMPRRVFNAQKKAQSSTD
PV14 pCMV_monoABE8.1_bpNLS + V82S + Q154R
MSEVEFSHEYWMRHALTLAKRARDEREVPVGAVLVLNNRVIGEGWNRAIGLHDPTAHAEIMA
LRQGGLVMQNYRLIDAILYSTFEPCVMCAGAMIHSRIGRVVFGVRNAKTGAAGSLMDVLHYP
GMNHRVEITEGILADECAALLCYFFRMPRRVFNAQKKAQSSTD

[0721] A guide RNA (gRNA) selected from among the following is used to target a rs113993993 258+2T>C. As shown in FIG. 2B, the following gRNA sequences are used in conjunction with a cytidine base editor to deaminate the cytosine present in the splice site, which is converted to thymidine, thereby restoring splicing:

5′-GUAAGCAGGCGGGUAACAGC-3′
5′-AGCAGGCGGGUAACAGCUGC-3′
5′-GCGGGUAACAGCUGCAGCAU-3′

[0722] In one embodiment, the cytidine base editor is BE4 or comprises APOBEC or AID. A modified SpCas9 including amino acid substitutions D1135M, S1136Q, G1218K, E1219F, A1322R, D1332A, R1335E, and T1337R and having specificity for the altered PAM 5′-NGC-3′ is used for correction of mutations associated with SDS. A wild-type SpCas9 having specificity for altered PAM 5′-NGG-3″ may be used in some embodiments.

[0723] Other pathogenic mutations affecting splicing are corrected using strategies similar to those illustrated in FIGS. 2A and 2B.

### Example 3 Cytidine Base Editors (CBEs) Having High On-Target Editing Activity to Treat SDS

[0724] As noted supra, Shwachman-Diamond Syndrome (SDS) is a disease inherited in an autosomal recessive pattern, characterized by bone marrow failure and clinically significant hematopoietic abnormalities. SDS has an incidence in the population of 1/77,000 (Compound Heterozygous) and results from point mutations (SNPs) in the SBDS gene that result in deficient RNA processing. SDS patients are at a higher risk of hematopoietic stem cell therapy (HSCT) rejection. One-third of patients have chronic neutropenia; myelodysplastic Syndrome (MDS) and acute leukemia occur in up to one third of patients. To date, clinical phenotype and treatment are highly variable and patient-specific. Treatments and medical interventions for SDS patients include red cell transfusions, management of recurrent and serious infections, bone marrow transplants and associated management.

[0725] A solution to providing a therapeutic treatment for SDS by employing base editing to restore correct splicing by targeting a SNP associated with SDS disease, e.g., as described herein. Experiments further to those described in Example 2 were performed using cytidine base editors (CBEs) that were developed to target a common splice site SNP in the SBDS gene for precise correction of the mutation. In particular, a mutation targeted in SBDS is rs113993993 C→T. (FIG. 2C and FIGS. 2B and 2D). In an embodiment, HSCT involving autologous CD34+ cells may be used in conjunction with CBE base editing to restore correct splicing by targeting the SNP mutation in the SBDS gene.

[0726] New base editors were produced and assessed for targeting a splice site SNP (e.g., SNP rs113993993 258+2T>C) in the SBDS gene (FIGS. 2A-2D). The base editors were cytidine base editors that comprised a cytidine deaminase component and a Cas9 component containing a combination of mutations in the Cas9 amino acid sequence (relative to a non-mutated, wildtype Cas9 (e.g., SpCas9) polypeptide sequence) that confer the ability of Cas9 to bind to a noncanonical PAM sequence, i.e. an NGC PAM or an NGC-containing PAM, e.g., NGCC, NGCT, NGCG, in a target polynucleotide (DNA) sequence (or target gene). Cas9 proteins containing the described combination of mutations are termed “Cas9 variants.” The cytidine base editors comprising a cytidine deaminase and a Cas9 variant are termed “NGC CBE variants” herein.

[0727] FIGS. 3A-3C show the amino acid positions in the Cas9 polypeptide sequence in which amino acid substitutions occur to produce the modified Cas9 variants, such as modified SpCas9, which have specificity for the altered PAM 5′-NGC-3′. By way of particular yet nonlimiting example, a modified Cas9 (SpCas9) variant polypeptide, termed “224” in FIGS. 3A-3C, includes the following combination of amino acid sequences/substitutions D1135M, 51136Q, G1218K, E1219F, A1322R, D1332, R1335E, and T1337R; a modified Cas9 (SpCas9) variant polypeptide, termed “225” in FIGS. 3A-3C, includes the following combination of amino acid sequences/substitutions D1135M, 51136Q, G1218K, E1219F, A1322R, D1332A, R1335E, and T1337R; a modified Cas9 (SpCas9) variant polypeptide, termed “226” in FIGS. 3A-3C, includes amino acid substitutions D1135M, 51136Q, G1218K, E1219F, A1322R, D1332K, R1335E, and 11337R; a modified Cas9 (SpCas9) variant polypeptide, termed “227” in FIGS. 3A-3C, includes amino acid substitutions D1135M, 51136Q, G1218K, E1219F, A1322R, D1332A, R1335E, and T1337Q; a modified Cas9 (SpCas9) variant polypeptide, termed “230” in FIGS. 3A-3C, includes amino acid substitutions D1135M, 51136Q, G1218K, E1219F, A1322R, D1332A, R1335Q, and T1337Q; a modified Cas9 (SpCas9) variant polypeptide, termed “235” in FIGS. 3A-3C, includes amino acid substitutions D1135M, 51136Q, G1218K, E1219F, A1322R, D1332A, R1335D, and T1337Q; a modified Cas9 (SpCas9) variant polypeptide, termed “237” in FIGS. 3A-3C, includes amino acid substitutions D1135Q, S1136, G1218T, E1219W, A1322R, D1332, R1335N, and T1337; a modified Cas9 (SpCas9) variant polypeptide, termed “242” in FIGS. 3A-3C, includes amino acid substitutions D1135H, S1136, G1218S, E1219W, A1322R, D1332, R1335V, and T1337; a modified Cas9 (SpCas9) variant polypeptide, termed “244” in FIGS. 3A-3C, includes amino acid substitutions D1135C, S1136W, G1218N, E1219W, A1322R, D1332, R1335N, and T1337; a modified Cas9 (SpCas9) variant polypeptide, termed “245” in FIGS. 3A-3C, includes amino acid substitutions D113LM, S1136W, G1218R, E1219S, A1322R, D1332, R1335E, and T1337; a modified Cas9 (SpCas9) variant polypeptide, termed “259” in FIGS. 3A-3C, includes amino acid substitutions D1135G, S1136W, G1218S, E1219M, A1322R, D1332, R1335Q, and T1337R; a modified Cas9 (SpCas9) variant polypeptide, termed “Nureki” in FIGS. 3A-3C, includes amino acid substitutions L111R, D1135V, 51136Q, G1218K, E1219F, A1322R, D1332, R1335A, and T1337R; a modified Cas9 (SpCas9) variant polypeptide, termed “NGC Rd1” in FIGS. 3A-3C, includes amino acid substitutions D1135M, S1136, 51216G, G1218, E1219, A1322, D1332A, R1335Q, and T1337; and a modified Cas9 (SpCas9) variant polypeptide, termed “267 (NGC Rd2)” in FIGS. 3A-3C, includes amino acid substitutions D1135G, S1136, 51216G, G1218, E1219, A1322R, D1332A, R1335E, and T1337R have specificity for the altered PAM 5′-NGC-3′ (or the PAM comprising 5′-NGC-3′) and are used for correction of mutations associated with SDS. These Cas9 variants, as well as others shown in FIGS. 3A-3C, are encoded by polynucleotides contained in plasmids having the same terminology, e.g., PV225, PV226, and PV230, respectively. The plasmids are utilized in cell-based (e.g., HEK293 cells), in vitro assays to assess the base editing efficiency of the NGC CBE base editors that target the mutated SNP in the SBDS gene. As would be appreciated by one having skill in the art, such plasmids (plasmid vectors) comprise a suitable promoter, e.g., a CMV promoter, and operably linked polynucleotide sequences encoding the cytidine deaminase and nuclease, e.g., Cas9 (SpCas9) variant, components. In some cases, all or a relevant portion of the SBDS polynucleotide sequence containing the target polynucleotide sequence may be contained in the plasmid, or may be contained in a separate plasmid. In some embodiments, virus vector(s) containing a suitable promoter sequence and the polynucleotide sequences of the CBE components and/or all or a relevant portion of the SBDS polynucleotide sequence are used. In an embodiment, the vector is a lentivirus vector. In some cases, the HEK293 cells are transfected with a vector, e.g., a lentivirus vector, that harbors all or a relevant portion of the SBDS polynucleotide sequence that contains the target splice site SNP.

[0728] The cytidine deaminase component of the variant NGC CBEs described herein include, without limitation, the cytidine deaminase BE4, or BE4 in which the APOBEC1 sequence is replaced with another APOBEC cytidine deaminase sequence as described herein; or various APOBEC cytidine deaminases as described supra and infra. The cytidine deaminases rAPOBEC1, BE4-rAPOBEC1, PpAPOBEC1, BE4-PpABOBEC1, PpAPOBEC1 containing an H122A substitution, BE4-PpAPOBEC1 containing an H122A substitution; BE4-RrA3F containing an F130L substitution; BE4-AmAPOBEC1; and BE4-SsAPOBEC2 provide base editing activity when used in conjunction with a Cas9 variant and a guide RNA as described herein. The relative mutation rate of CBEs containing different, representative cytidine deaminases is shown in FIG. 4.

[0729] Guide RNAs (gRNAs) and target gRNAs used in conjunction with the NGC CBE variants to target the SBDS target polynucleotide sequence containing the splice site SNP (SNP rs113993993 258+2T>C) and restore correct splicing are shown in FIG. 5 and in Table 12 below.

TABLE 12
gRNAs used with NGC CBE variants

| Guide RNA | | |
|---|---|---|
| Number | gRNA | PAM |
| 43 | 5′-GUAAGCAGGCGGGUAACAGC-3′ | NGC |
| 44 | 5′-AGCAGGCGGGUAACAGCUGC-3′ | NGC |
| 45 | 5′-GCGGGUAACAGCTGCAGCAU-3′ | NGC |
| 88 | 5′-GCAGGCGGGUAACAGCUGC-3′ | NGC |
| 199 | 5′-CAGGCGGGUAACAGCUGC-3′ | AGC |
| 200 | 5′-AGGCGGGUAACAGCUGC-3′ | AGC |
| 201 | 5′-AAGCAGGCGGGUAACAGCUGC-3′ | AGC |

The scaffold sequence for the gRNAs used in the studies described herein is as follows:

GUUUUAGAGC UAGAAAUAGC AAGUUAAAAU AAGGCUAGUC
CGUUAUCAAC UUGAAAAAGU GGCACCGAGU CGGUGCUUUU
(UUU).

[0730] By way of example, the 19mer gRNA (G88) and the 20mer gRNA (G44) used in conjunction with the NGC CBE variants as described herein, e.g., cytidine deaminase, BE4, and the Cas9 variants 226 and 230, showed a high percentage of on-target editing and a limited percentage of bystander edits, as well as a high degree of C→T on target editing. (FIGS. 6A and 6B). FIG. 6C shows that the 20mer gRNA (G44) used in conjunction with CBEs comprising a cytidine deaminase, e.g., BE4, and a number of different Cas9 variants (e.g., SpCas9 variants) in CBEs demonstrated a high percentage of on-target base editing and a low percentage of bystander (non-specific) editing. The target sequence and SNP site are represented by a bold “C” at position 7 of the sequence; the “C” at position 3 of the sequence represents a bystander nucleotide in the target sequence. The plasmid encoding the CBE comprising the SpCas9 variant termed “226” (FIGS. 3A-3C) is designated “PV226” in the figure.

[0731] The NGC CBE variants as described herein optimally exhibited a high percentage of on-target editing to restore corrective splicing, while concomitantly exhibiting low or limited bystander editing and/or off-target editing activity. As will be appreciated by the skilled artisan, a limited bystander editing activity exhibited by a cytidine base editor as described herein refers to a low percentage or limited activity of nucleobase editing within the base editing window.

### Example 4 NGC Cytidine Base Editors (CBEs) Generated for High On-Target Editing Activity to Treat SDS

[0732] Additional cytidine base editors were generated comprising the NGC PAM interacting Cas9 variants described herein, such as 225, 226 and 244 having the sequences shown in FIGS. 3A-3C, in conjunction with several different cytidine deaminases. Plasmids encoding the Cas9 variants 225, 226 and 244, i.e., PV225, and PV244, respectively, were generated. In addition, plasmids containing polynucleotides encoding both a Cas9 variant and a cytidine deaminase, either together or separately, were constructed. Table 13 below shows the NGC CBEs (comprising a Cas9 variant and a cytidine deaminase polypeptide) that were created and used in studies to assess their ability to target the rs113993993 C→T mutation in the SBDS gene and to restore correct splicing.

TABLE 13

| CBE (or Plasmid) | CBE components- |
|---|---|
| name | Cas9_Cytidine Deaminase |
| 447 | PV-225_AmAPOBEC1 |
| 448 | PV225_PmCDA1 |
| 449 | PV225_PpAPOBEC1 H122A |
| 450 | PV225_RRA3F |
| 451 | PV225_SsAPOBEC2 |
| 452 | PV226_AmpAPOBEC1 |
| 453 | PV226_PmCDA1 |
| 454 | PV226_PpAPOBEC1 H122A |
| 455 | PV226_RRA3F |
| 456 | PV226_SsAPOBEC2 |
| 457 | PV244_AmAPOBEC1 |
| 458 | PV244_PmCDA1 |
| 459 | PV244_PpAPOBEC1 H122A |
| 460 | PV244_RRA3F |
| 461 | PV244_SsAPOBEC2 |

[0733] The NGC CBEs (cytidine base editors containing a cytidine deaminase and a Cas9 variant (e.g., an SpCas9 variant) containing a combination of amino acid mutations which provide the Cas9 protein with the ability to bind a PAM comprising NGC), together with one or more gRNAs, in particular, a 19mer and a 20mer gRNA such as G88 and G44, respectively, were assayed in HEK293 cells harboring the SBDS gene for on-target base editing of the SNP mutation in the SBDS gene. FIGS. 7A and 7B show the percent base editing activities of the various NGC CBEs described in Table 13 used together with the 19mer and 20mer gRNAs, e.g., G88 and G44. Further experiments were conducted with CBEs comprised of the cytidine deaminase PpAPOBEC1 and Cas9 variants 225, 454 and 459 having the specific combinations of mutations in the Cas9 sequences as presented in FIGS. 3A-3C, together with either the 19mer or the 20mer gRNAs to determine percentage editing/on-target and bystander editing activities in cell-based (HEK293) assays to correct the splice site SNP in the SBDS polynucleotide sequence (FIGS. 8A and 8B). As shown in FIGS. 8A and 8B, high on-target editing was exhibited by NGC CBEs 454 and 459 (Table 13) containing the PpAPOBEC1 cytodine deaminase and the Cas9 variants 226 and 244 (FIGS. 3A-3C), respectively. FIGS. 8C and 8D show the on-target and bystander base editing percentages of an NGC CBE comprising the AmAPOBEC1 cytidine deaminase and the Cas9 variants 225, 226 and 244 (FIGS. 3A-3C) together with either the 19mer (Guide 88) or the 20mer (Guide 44) gRNA in cell-based (HEK293) assays to correct the splice site SNP in the SBDS polynucleotide sequence. FIGS. 8E and 8F show the on-target and bystander base editing percentages of an NGC CBE comprising the PmCDA1 cytidine deaminase and the Cas9 variants 225, 453 and 458 (Table 13) together with either the 19mer (Guide 88) or the 20mer (Guide 44) gRNA in cell-based (HEK293) assays to correct the splice site SNP in the SBDS polynucleotide sequence. FIGS. 8G and 8H show the on-target and bystander base editing percentages of an NGC CBE comprising the RRA3F cytidine deaminase and the Cas9 variants 225, 455 and 460 (Table 13) together with either the 19mer (Guide 88) or the 20mer (Guide 44) gRNA in cell-based (HEK293) assays to correct the splice site SNP in the SBDS polynucleotide sequence. FIGS. 81 and 8J show the on-target and bystander base editing percentages of an NGC CBE comprising the SsAPOBEC2 cytidine deaminase and the Cas9 variants 225, 456 and 461 (Table 13) together with either the 19mer (Guide 88) or the 20mer (Guide 44) gRNA in cell-based (HEK293) assays to correct the splice site SNP in the SBDS polynucleotide sequence. In FIGS. 8A-8J, Cas9 variant 225 (or PV225) is alternatively termed “Beam shuffle.”

[0734] In further studies, additional amino acid mutations were created in the cytidine deaminase polypeptide, e.g., an H122A mutation in the PpAPOBEC1 polypeptide sequence, to determine if higher on-target base editing of the splice site SNP in the SBDS gene and correction of the splice site occurred. In addition to the H122A mutation alone, the H122A mutation and amino acid mutations R33A, W90F, K34A, R52A, H121A and Y120F were also made in the PpAPOBEC1 amino acid sequence to produce NGC CBEs for determining base editing efficiency (i.e., percentage of on-target editing versus bystander editing). The further mutated NGC CBE variants together with 19mer or 20mer gRNAs were tested in in vitro cell-based assays. As shown in FIGS. 9A and 9B, with either the 19mer or the 20mer gRNA, the additional mutations made in the PpAPOBEC1 cytidine deaminase polypeptide did not result in significantly increased base editing efficiency by the NGC CBEs containing them. FIGS. 9C and 9D present the data shown in FIGS. 9A and 9B, respectively, in dot blot format.

### Example 5 Other NGC Cytidine Base Editors (CBEs) Containing SpCas9 Variants Having Activity on 5′-NGC-3′ PAMs to Treat SDS

[0735] To obtain and assess other NGC cytidine base editors containing SpCas9 variants having activity on 5′-NGC-3′ PAMs for use in treating SDS, additional SpCas9 variants with further mutations were produced. These NGC CBEs containing SpCas9 variants (PV225 and PV244 (FIGS. 3A-3C) and containing other amino acid substitutions) were termed “NRCH” editor variants, as the amino acid substitutions contained in these SpCas9 variants were similar to those described for SpCas9 variants capable of recognizing “NRCH” PAMs, where R=A or G, and H=A, C, or T (i.e., NRCH SpCas9), as described by S. Miller et al., April, 2020, “Continuous evolution of SpCas9 variants compatible with non-G PAMs,” Nature Biotechnology, 38(4):471-481 (published online 2020 Feb. 10. doi: 10.1038/s41587-020-0412-8), the contents of which are incorporated by reference herein in their entirety. As described by Miller et al., cytidine base editors containing a cytidine deaminase and a NRCH SpCas9 variant had a distinctly evolved preference for a C nucleobase at the third position in the PAM.

[0736] FIG. 10 presents a table depicting the mutations and combinations of mutations that were made in the SpCas9 protein to create NRCH-based SpCas9 variants. Combinations of the NRCH mutations as shown in FIG. 10 were included in several different SpCas9 variants to determine the combination of mutations that would be most beneficial for the SpCas9 variant component in the NGC CBEs used for correcting the splice site SNP in the SBDS gene associated with SDS. In a particular example, NGC CBEs containing a given cytidine deaminase, e.g., PpAPOBEC1 and the like, and an SpCas9 variant comprising certain mutations (FIGS. 3A-3C), together with combinations of NRCH mutations as described in Miller et al., supra, and exemplified below, may provide high percentages of on target editing and low percentages of bystander edits. In particular embodiments, the SpCas9 variants having the best ability to bind NGC PAM mutations may be combined with the PpAPOBEC H122A cytidine deaminase to identify those CBEs that demonstrate high on-target base editing compared with bystander effects. In related embodiments, an NGC CBE plasmid or viral vector construct comprising a polynucleotide encoding a SpCas9 variant, e.g., as shown in FIGS. 3A-3C, Table 13, or FIG. 10, having demonstrated ability to bind an NGC PAM and a cytidine deaminase, e.g., PpAPOBEC H122A, are encompassed to evaluate optimal combinations that provide the highest on target and lowest bystander editing in cell-based systems as described herein.

[0737] By way of particular example, the additional amino acid substitutions in 225 and 244 SpCas9 variants included one or more of A10T, I322V, S4091, E427G, R645L, R753G, R1114G, Q1221H, Y1336, 51338T, and H1349R (e.g., NRCH mutations in SpCas9). The on-target and bystander nucleobase editing by NGC CBEs containing NRCH SpCas9 variants and a cytidine deaminase, together with the 19mer or 20mer gRNAs as used in the experiments described in the Examples above, were assessed in cell-based (HEK293) assays to evaluate correction of the splice site SNP in the SBDS polynucleotide sequence (FIGS. 11A and 11B). As observed in FIGS. 11A and 11B, base editors 468 and 469 (Table 10) exhibited a high percentage of on-target base editing when used in conjunction with either the 19mer or the 20mer gRNA.

### Example 6 mRNAs Encoding and Delivering NGC CBEs

[0738] Representative NGC CBE editors were cloned to produce mRNAs encoding these base editors. mRNA encoding the base editors is an optimal delivery system to achieve base editing in target DNA, e.g., the SBDS gene, in cells, and is also particularly suitable for therapeutic use in the clinic. As would be appreciated by the skilled practitioner, mRNA may shift the editing window and increase the efficiency of editing. Base editors having a higher percentage of C→T transitions and low or limited percentages of C→A or C→G transitions are especially useful and suitable for mRNA delivery. Therefore, mRNA encoding several of the NGC CBEs that showed high percentages of on-target base editing (e.g., NGC CBEs 454, 459 and 449, Table 13) were assessed with gRNAs of different lengths. In vitro cell-based assays were carried out to assess base editing efficiency and on-target versus bystander editing percentages of NGC CBEs encoded by mRNA. (FIGS. 12A-12C). In FIGS. 12A-12C, mRNA340 refers to an mRNA encoding CBE #449 (Table 13) comprising the SpCas9 variant 225 (or PV225) and the cytidine deaminase PPAPOBEC1 H122A; mRNA341 refers to an mRNA encoding CBE #454 (Table 13) comprising the SpCas9 variant 226 (or PV226), FIGS. 3A-3C, and the cytidine deaminase PPAPOBEC1 H122A, the sequence of which is provided hereinabove; and mRNA342 refers to an mRNA encoding CBE #459 (Table 13) comprising the SpCas9 variant 244 (or PV244) and the cytidine deaminase PPAPOBEC1 H122A. As shown in FIGS. 12A-12C, mRNA 342 exhibited the fewest C to A or C to G transitions, particularly when used with the 18mer and 20mer gRNAs.

[0739] The results of the experiments described in Examples 3-6 supra demonstrate that a Cas9 variant, namely, a SpCas9 variant containing a combination of mutations conferring the ability to bind an NGC PAM (i.e., a 5′-NGC-3′ PAM variant) is a viable option for base editing to achieve a low percentage of off-target effects (bystander editing) and a high percentage of on-target base editing. The results further demonstrate that using the NGC CBEs as described herein provide greater than 40% on target efficiency while limiting the bystander editing. These NGC CBEs are able to be encoded by mRNA, which showed efficient base editing when assayed in a cell-based system. In particular, gRNAs of certain lengths, for example, 18mer (e.g., G and 20mer gRNAs, can further decrease bystander (off-target) editing. Accordingly, the NGC CBEs described herein, and compositions and methods thereof, provide beneficial and useful therapeutics for treating SDS.

### Example 7 Materials and Methods

[0740] The results provided in the Examples described herein were obtained using the following materials and methods.

### Cloning.

[0741] DNA sequences of target polynucleotides and gRNAs and primers used are described herein. The following scaffold olynucleotide sequence was employed in the experiments described herein:

GTTTTAGAGCTAGAAATAGCAAGTTAAAATAAGGCTAGTCCGTTATCAA
CTTGAAAAAGTGGCACCGAGTCGGTGCTTTTTTT. For gRNAs,
the scaffold sequence is presented as follows,
wherein uracil (U) replaces thymidine (T) in RNA:
GUUUUAGAGC UAGAAAUAGC AAGUUAAAAU AAGGCUAGUC
CGUUAUCAAC UUGAAAAAGU GGCACCGAGU CGGUGCUUUU(UUU).

[0742] The gRNA encompasses the scaffold sequence and the spacer sequence (target sequence) for an SDS gene comprising a pathogenic mutation as described herein or as determined based on the knowledge of the skilled practitioner and as would be understood to the skilled practitioner in the art.

[0743] Methods for base editing are known in the art. See, e.g., Komor, A. C., et al., “Programmable editing of a target base in genomic DNA without double-stranded DNA cleavage” Nature 533, 420-424 (2016); Gaudelli, N. M., et al., “Programmable base editing of A⋅T to G⋅C in genomic DNA without DNA cleavage” Nature 551, 464-471 (2017); Komor, A. C., et al., “Improved base excision repair inhibition and bacteriophage Mu Gam protein yields C:G-to-T:A base editors with higher efficiency and product purity” Science Advances 3:eaao4774 (2017), and Rees, H. A., et al., “Base editing: precision chemistry on the genome and transcriptome of living cells.” Nat Rev Genet. 2018 December; 19(12):770-788. doi: 10.1038/s41576-018-0059-1.

[0744] PCR was performed using VeraSeq ULtra DNA polymerase (Enzymatics), or Q5 Hot Start High-Fidelity DNA Polymerase (New England Biolabs). Base Editor (BE) plasmids were constructed using USER cloning (New England Biolabs). Deaminase genes were synthesized as gBlocks Gene Fragments (Integrated DNA Technologies). Cas9 genes useful in the invention are listed below and described herein. Cas9 genes were obtained from previously reported plasmids. Deaminase and fusion genes were cloned into pCMV (mammalian codon-optimized) or pET28b (E. coli codon-optimized) backbones. sgRNA expression plasmids are constructed using site-directed mutagenesis.

[0745] Briefly, primers useful in the invention are 5′ phosphorylated using T4 Polynucleotide Kinase (New England Biolabs) according to the manufacturer's instructions. Next, PCR was performed using Q5 Hot Start High-Fidelity Polymerase (New England Biolabs) with the phosphorylated primers and the plasmid encoding a gene of interest as a template according to the manufacturer's instructions. PCR products were incubated with DpnI (20 U, New England Biolabs) at 37° C. for 1 hour, purified on a QIAprep spin column (Qiagen), and ligated using QuickLigase (New England Biolabs) according to the manufacturer's instructions. DNA vector amplification was carried out using Mach1 competent cells (ThermoFisher Scientific).

In Vitro Deaminase Assay on ssDNA.

[0746] Sequences of all ssDNA substrates were obtained using standard methods. All Cy3-labelled substrates are obtained from Integrated DNA Technologies (IDT). Deaminases were expressed in vitro using the TNT T7 Quick Coupled Transcription/Translation Kit (Promega) according to the manufacturer's instructions using 1 μg of plasmid. Following protein expression, 5 μl of lysate was combined with 35 μl of ssDNA (1.8 μM) and USER enzyme (1 unit) in CutSmart buffer (New England Biolabs) (50 mM potassium acetate, 29 mM Tris-acetate, 10 mM magnesium acetate, 100 μg ml-1 BSA, pH 7.9) and incubated at 37° C. for 2 h. Cleaved U-containing substrates were resolved from full-length unmodified substrates on a 10% TBE-urea gel (Bio-Rad).

### Expression and Purification of Base Editors.

[0747] E. coli BL21 STAR (DE3)-competent cells (ThermoFisher Scientific) were transformed with plasmids (e.g. plasmids encoding pET28b-His6-PV1-14 or pET28b-His6-APOBEC-linker-dCas9). The resulting expression strains were grown overnight in Luria-Bertani (LB) broth containing 100 μg ml-1 of kanamycin at 37° C. The cells were diluted 1:100 into the same growth medium and grown at 37° C. to OD600=˜0.6. The culture was cooled to 4° C. over a period of 2 h, and isopropyl-β-d-1-thiogalactopyranoside (IPTG) was added at 0.5 mM to induce protein expression. After ˜16 h, the cells were collected by centrifugation at 4,000 g and were resuspended in lysis buffer (50 mM tris(hydroxymethyl)-aminomethane (Tris)-HCl (pH 7.5), 1 M NaCl, 20% glycerol, 10 mM tris(2-carboxyethyl)phosphine (TCEP, Soltec Ventures)). The cells were lysed by sonication (20 s pulse-on, 20 s pulse-off for 8 min total at 6 W output) and the lysate supernatant was isolated following centrifugation at 25,000 g for 15 minutes. The lysate was incubated with His-Pur nickel-nitriloacetic acid (nickel-NTA) resin (ThermoFisher Scientific) at 4° C. for 1 hour to capture the His-tagged fusion protein. The resin was transferred to a column and washed with 40 ml of lysis buffer. The His-tagged fusion protein was eluted in lysis buffer supplemented with 285 mM imidazole, and concentrated by ultrafiltration (Amicon-Millipore, 100-kDa molecular weight cut-off) to 1 ml total volume. The protein was diluted to 20 ml in low-salt purification buffer containing 50 mM tris(hydroxymethyl)-aminomethane (Tris)-HCl (pH 7.0), 0.1 M NaCl, 20% glycerol, 10 mM TCEP and was loaded onto SP Sepharose Fast Flow resin (GE Life Sciences). The resin was washed with 40 ml of this low-salt buffer, and the protein was eluted with 5 ml of activity buffer containing 50 mM tris(hydroxymethyl)-aminomethane (Tris)-HCl (pH 7.0), 0.5 M NaCl, 20% glycerol, 10 mM TCEP. The eluted proteins were quantified by SDS-PAGE.

In Vitro Transcription of sgRNAs.

[0748] Linear DNA fragments containing the T7 promoter followed by the 20-bp sgRNA target sequence were transcribed in vitro using the TranscriptAid T7 High Yield Transcription Kit (ThermoFisher Scientific) according to the manufacturer's instructions. sgRNA products were purified using the MEGAclear Kit (ThermoFisher Scientific) according to the manufacturer's instructions and quantified by UV absorbance.

Preparation of Cy3-Conjugated dsDNA Substrates.

[0749] Typically, unlabled sequence strands (e.g. sequences of 80-nt unlabelled strands) are ordered as PAGE-purified oligonucleotides from IDT. A 25-nt Cy3-labelled primer complementary to the 3′ end of each 80-nt substrate is ordered as an HPLC-purified oligonucleotide from IDT. To generate the Cy3-labelled dsDNA substrates, the 80-nt strands (5 μl of a 100 μM solution) were combined with the Cy3-labelled primer (5 μl of a 100 μM solution) in NEBuffer 2 (38.25 μl of a 50 mM NaCl, 10 mM Tris-HCl, 10 mM MgCl₂, 1 mM DTT, pH 7.9 solution, New England Biolabs) with dNTPs (0.75 μl of a 100 mM solution) and heated to 95° C. for 5 min, followed by a gradual cooling to 45° C. at a rate of 0.1° C. per s. After this annealing period, Klenow exo— (5 U, New England Biolabs) was added and the reaction is incubated at 37° C. for 1 hour (h). The solution was diluted with buffer PB (250 μl, Qiagen) and isopropanol (50 μl) and purified on a QIAprep spin column (Qiagen), eluting with 50 μl of Tris buffer.

[0750] Deaminase Assay on dsDNA.

[0751] The purified fusion protein (20 μl of 1.9 μM in activity buffer) was combined with 1 equivalent of appropriate sgRNA and incubated at ambient temperature for 5 minutes. The Cy3-labelled dsDNA substrate was added to final concentration of 125 nM and the resulting solution was incubated at 37° C. for 2 h. The dsDNA is separated from the fusion by the addition of buffer PB (100 μl, Qiagen) and isopropanol (25 μl) and purified on a EconoSpin micro spin column (Epoch Life Science), eluting with 20 μl of CutSmart buffer (New England Biolabs). USER enzyme (1 U, New England Biolabs) is added to the purified, edited dsDNA and incubated at 37° C. for 1 h. The Cy3-labeled strand was fully denatured from its complement by combining 5 μl of the reaction solution with 15 μl of a DMSO-based loading buffer (5 mM Tris, 0.5 mM EDTA, 12.5% glycerol, 0.02% bromophenol blue, 0.02% xylene cyan, 80% DMSO). The full-length C-containing substrate was separated from any cleaved, U-containing edited substrates on a 10% TBE-urea gel (Bio-Rad) and imaged on a GE Amersham Typhoon imager.

Preparation of In Vitro-Edited dsDNA for High-Throughput Sequencing.

[0752] Oligonucleotides were obtained from IDT. Complementary sequences were combined (5 μl of a 100 μM solution) in Tris buffer and annealed by heating to 95° C. for 5 min, followed by a gradual cooling to 45° C. at a rate of 0.1° C. per s to generate 60-bp dsDNA substrates. Purified fusion protein (20 μl of 1.9 μM in activity buffer) was combined with 1 equivalent of appropriate sgRNA and incubated at ambient temperature for 5 min. The 60-mer dsDNA substrate was added to final concentration of 125 nM, and the resulting solution is incubated at 37° C. for 2 h. The dsDNA was separated from the fusion by the addition of buffer PB (100 μl, Qiagen) and isopropanol (25 μl) and purified on a EconoSpin micro spin column (Epoch Life Science), eluting with 20 μl of Tris buffer. The resulting edited DNA (1 μl is used as a template) was amplified by PCR using high-throughput sequencing primer pairs and VeraSeq Ultra (Enzymatics) according to the manufacturer's instructions with 13 cycles of amplification. PCR reaction products were purified using RapidTips (Diffinity Genomics), and the purified DNA is amplified by PCR with primers containing sequencing adapters, purified, and sequenced on a MiSeq high-throughput DNA sequencer (Illumina) as previously described.

### Cell Culture.

[0753] HEK293T (ATCC CRL-3216) and U2OS (ATCC HTB-96) expressing wild-type SDSP or mutant SDSP were maintained in Dulbecco's Modified Eagle's Medium plus GlutaMax (ThermoFisher) supplemented with 10% (v/v) fetal bovine serum (FBS), at 37° C. with 5% CO2. HCC1954 cells (ATCC CRL-2338) were maintained in RPMI-1640 medium (ThermoFisher Scientific) supplemented as described above. Immortalized cells containing SDSP) (Taconic Biosciences) were cultured in Dulbecco's Modified Eagle's Medium plus GlutaMax (ThermoFisher Scientific) supplemented with 10% (v/v) fetal bovine serum (FBS) and 200 μg ml-1 Geneticin (ThermoFisher Scientific).

### Transfections.

[0754] HEK 293T cells (ATCC CRL-3216) maintained in Dulbecco's Modified Eagle's Medium plus GlutaMax (Thermo Fisher Scientific) supplemented with 10% (v/v) FBS at 37° C. with 5% CO₂ were seeded on 48-well collagen-coated BioCoat plates (Corning) and transfected at approximately 80-85% confluency. Briefly, 750 ng of BE or other cytidine deaminase and/or 200 ng of SpCas9, and 250 ng of sgRNA expression plasmids were transfected using 1.5 μl of Lipofectamine 2000 (ThermoFisher Scientific) per well according to the manufacturer's protocol. HEK293T cells were transfected using appropriate Amaxa Nucleofector II programs according to manufacturer's instructions (V kits using program Q-001 for HEK293T cells). In some cases, cells were cultured for 3 days post-transfection before the medium was removed. Cells were washed with 1×PBS solution (Thermo Fisher Scientific), and genomic DNA was extracted by addition of 30 μL lysis buffer (10 mM Tris-HCl, pH 7.0, 0.05% SDS, 25 Proteinase K (Thermo Fischer Scientific). Genomic DNA was stored at −20° C. until further use.

### High-Throughput DNA Sequencing of Genomic DNA Samples.

[0755] Transfected cells were harvested after 3 days, and the genomic DNA was isolated using the Agencourt DNAdvance Genomic DNA Isolation Kit (Beckman Coulter) according to the manufacturer's instructions. On-target and off-target genomic regions of interest were amplified by PCR with flanking high-throughput sequencing primer pair. PCR amplification was carried out with Phusion high-fidelity DNA polymerase (ThermoFisher) according to the manufacturer's instructions using 5 ng of genomic DNA as a template. Cycle numbers were determined separately for each primer pair as to ensure the reaction was stopped in the linear range of amplification. PCR products were purified using RapidTips (Diffinity Genomics). Purified DNA was amplified by PCR with primers containing sequencing adaptors. The products were gel purified and quantified using the Quant-iT PicoGreen dsDNA Assay Kit (ThermoFisher) and KAPA Library Quantification Kit-Illumina (KAPA Biosystems). Samples were sequenced on an Illumina MiSeq as previously described (Pattanayak, Nature Biotechnol. 31, 839-843 (2013)).

### Data Analysis.

[0756] Sequencing reads were automatically demultiplexed using MiSeq Reporter (Illumina), and individual FASTQ files were analysed with a custom Matlab. Each read was pairwise aligned to the appropriate reference sequence using the Smith-Waterman algorithm. Base calls with a Q-score below 31 were replaced with Ns and were thus excluded in calculating nucleotide frequencies. This treatment yields an expected MiSeq base-calling error rate of approximately 1 in 1,000. Aligned sequences in which the read and reference sequence contained no gaps were stored in an alignment table from which base frequencies could be tabulated for each locus. Indel frequencies were quantified with a custom Matlab script using previously described criteria (Zuris, et al., Nature Biotechnol. 33, 73-80 (2015). Sequencing reads were scanned for exact matches to two 10-bp sequences that flank both sides of a window in which indels might occur. If no exact matches were located, the read was excluded from analysis. If the length of this indel window exactly matched the reference sequence the read was classified as not containing an indel. If the indel window was two or more bases longer or shorter than the reference sequence, then the sequencing read was classified as an insertion or deletion, respectively.

### OTHER EMBODIMENTS

[0757] From the foregoing description, it will be apparent that variations and modifications may be made to the invention described herein to adopt it to various usages and conditions. Such embodiments are also within the scope of the following claims.

[0758] The recitation of a listing of elements in any definition of a variable herein includes definitions of that variable as any single element or combination (or subcombination) of listed elements. The recitation of an embodiment herein includes that embodiment as any single embodiment or in combination with any other embodiments or portions thereof.

### INCORPORATION BY REFERENCE

[0759] All publications, patents, and patent applications mentioned in this specification are herein incorporated by reference to the same extent as if each individual publication, patent, or patent application was specifically and individually indicated to be incorporated by reference. Absent any indication otherwise, publications, patents, and patent applications mentioned in this specification are incorporated herein by reference in their entireties.

1. A method of editing a polynucleotide to permit transcription, the method comprising contacting the polynucleotide with a base editor in complex with one or more guide polynucleotides, wherein the base editor comprises a polynucleotide programmable DNA binding domain and a deaminase domain, and wherein one or more of the guide polynucleotides targets the base editor to effect an alteration that introduces a mutation that is permissive for transcription.

2. The method of claim 1, wherein the mutation that is permissive for transcription is a mutation that alters a stop codon, a mutation that introduces a splice acceptor or splice donor site, or a mutation that corrects a splice acceptor or splice donor site.

3. A method of editing a SBDS polynucleotide comprising a mutation associated with Shwachman Diamond Syndrome (SDS), the method comprising contacting the SBDS polynucleotide with a base editor in complex with one or more guide polynucleotides, wherein the base editor comprises a polynucleotide programmable DNA binding domain and a deaminase domain, and wherein one or more of the guide polynucleotides target the base editor to effect an alteration of a mutation associated with Shwachman Diamond Syndrome (SDS).

4. The method of claim 1, wherein the deaminase is a cytidine deaminase or an adenosine deaminase.

5-10. (canceled)

11. The method of claim 3, wherein the base editor is an adenosine base editor (ABE), and wherein one or more of the guide polynucleotides target the base editor to effect an A⋅T to G⋅C alteration of 183-184TA>CT Rs113993991 to generate a missense mutation.

12. The method of claim 4, wherein the guide polynucleotides target one of the following sequences:
TGTAAATGTTTCCTAAGGTC
or
AATGTTTCCTAAGGTCAGGT.

13. The method of claim 7, wherein the ABE has a 5′-NGC-3′ or 5′-NGG-3′ PAM specificity.

14. The method of claim 11, wherein the base editor is a cytidine base editor, and wherein one or more of the guide polynucleotides target the base editor to effect C⋅G to T⋅A alteration of rs113993993 258+2T>C.

15-18. (canceled)

19. The method of claim 3, wherein the mutation associated with Shwachman Diamond Syndrome (SDS) results from a gene conversion, introduces a stop codon or alters splicing of the gene or encodes an SBDS polypeptide having a truncation.

20-25. (canceled)

26. The method of claim 3, wherein the polynucleotide programmable DNA binding domain comprises a modified SpCas9 or SpCas9 variant having an altered protospacer-adjacent motif (PAM) specificity.

27-44. (canceled)

45. A cell produced by introducing into the cell, or a progenitor thereof:
a base editor, a polynucleotide encoding the base editor, to the cell, wherein the base editor comprises a polynucleotide programmable DNA binding domain and a deaminase domain; and
one or more guide polynucleotides that target the base editor to effect an alteration associated with aberrant splicing.

46-47. (canceled)

48. The cell of claim 45, wherein the cell is from a subject having Shwachman Diamond Syndrome (SDS).

49-72. (canceled)

73. A method of treating Shwachman Diamond Syndrome (SDS) or a disease associated with aberrant splicing in a subject in need thereof, the method comprising administering to the subject a cell of claim 45.

74-75. (canceled)

76. A method of treating Shwachman Diamond Syndrome (SDS) in a subject, the method comprising: administering to a subject in need thereof:
a base editor, or a polynucleotide encoding the base editor, wherein the base editor comprises a polynucleotide programmable DNA binding domain and a deaminase domain; and
one or more guide polynucleotides that target the base editor to effect an alteration of a mutation associated with SDS.

77. A method of treating a genetic disease associated with aberrant splicing in a subject, the method comprising: administering to a subject in need thereof:
a base editor, or a polynucleotide encoding the base editor, wherein the base editor comprises a polynucleotide programmable DNA binding domain and a deaminase domain; and
one or more guide polynucleotides that target the base editor to effect an alteration of a pathogenic mutation that alters splicing.

78-83. (canceled)

84. The method of claim 76, wherein the base editor correction replaces the Lysine (K) at amino acid position 62 with a Tryptophan (W).

85-104. (canceled)

105. A method of producing a cell, or progenitor thereof, the method comprising:
(a) introducing into an induced pluripotent stem cell comprising a gene conversion associated with Shwachman Diamond Syndrome (SDS),
a base editor, or a polynucleotide encoding the base editor, wherein the base editor comprises a polynucleotide-programmable nucleotide-binding domain and a cytidine deaminase domain or an adenosine deaminase domain; and
one or more guide polynucleotides, wherein the one or more guide polynucleotides target the base editor to effect an alteration in a mutation associated with SDS; and
(b) differentiating the induced pluripotent stem cell or progenitor into a desired cell type.

106-124. (canceled)

125. A guide RNA comprising a nucleic acid sequence from 5′ to 3′, or a 1, 2, 3, 4, or 5 nucleotide 5′ truncation fragment thereof, selected from one or more of:
GUAAGCAGGCGGGUAACAGC;
AGCAGGCGGGUAACAGCUGC;
GCGGGUAACAGCUGCAGCAU;
UGUAAAUGUUUCCUAAGGUC;
AAUGUUUCCUAAGGUCAGGU,
GCAGGCGGGUAACAGCUGC,
CAGGCGGGUAACAGCUGC,
AGGCGGGUAACAGCUGC,
and
AAGCAGGCGGGUAACAGCUGC.

126. A base editor system for editing a pathogenic mutation in an SBDS gene, wherein the base editor system comprises:
(a) a base editor comprising:
(i) a polynucleotide-programmable DNA-binding domain, and
(ii) a deaminase domain capable of deaminating a polynucleotide present in the SBDS gene conversion or its complement nucleobase; and
(b) a guide polynucleotide in conjunction with the polynucleotide-programmable DNA-binding domain, wherein the guide polynucleotide targets the base editor to a target polynucleotide sequence at least a portion of which is located in the SBDS gene, an SBDS pseudo gene, or a reverse complement thereof;
wherein deaminating a polynucleotide or its complementary nucleobase permits transcription of the SBDS gene.

127. A base editor system for editing a mutation in a gene that results in aberrant splicing, wherein the base editor system comprises:
(a) a base editor comprising:
(i) a polynucleotide-programmable DNA-binding domain, and
(ii) a deaminase domain capable of deaminating a mutation or its complement nucleobase that results in aberrant splicing; and
(b) a guide polynucleotide in conjunction with the polynucleotide-programmable DNA-binding domain, wherein the guide polynucleotide targets the base editor to a target polynucleotide sequence at least a portion of which is located in the gene or its reverse complement;
wherein deaminating the mutation or its complement nucleobase permits transcription.

128. A method of editing a pathogenic mutation in a gene that results in aberrant splicing, wherein the method comprises:
contacting a target nucleotide sequence, at least a portion of which is located in the gene or its reverse complement, with a base editor comprising:
(i) a polynucleotide-programmable DNA-binding domain in conjunction with a guide polynucleotide that targets the base editor to the target polynucleotide sequence, at least a portion of which is located in the gene or its reverse complement, and
(ii) a deaminase domain capable of deaminating the pathogenic mutation that results in aberrant splicing or its complement nucleobase; and
editing the pathogenic mutation by deaminating the pathogenic mutation or its complement nucleobase upon targeting of the base editor to the target nucleotide sequence,
wherein deaminating the pathogenic mutation or its complement nucleobase results in a conversion of the pathogenic mutation to a sequence that permits splicing, thereby correcting the pathogenic mutation.

129-133. (canceled)

134. The method of claim 133, wherein the base editor corrects a splice donor SNP site comprising a mutation in rs113993993 C→T in the SBDS gene.

135. A method of treating SDS in a subject by editing a pathogenic mutation in an SBDS gene, the method comprising:
administering a base editor, or a polynucleotide encoding the base editor, to a subject in need thereof, wherein the base editor comprises:
(i) a polynucleotide-programmable DNA-binding domain, and
(ii) a deaminase domain capable of deaminating a nucleobase within the pathogenic mutation or its complement nucleobase; and
administering a guide polynucleotide to the subject, wherein the guide polynucleotide targets the base editor to a target nucleotide sequence at least a portion of which is located in the gene or its reverse complement; and
editing the pathogenic mutation in an SBDS geneby deaminating the pathogenic mutation or its complement nucleobase upon targeting of the base editor to the target nucleotide sequence,
wherein deaminating the pathogenic mutation or its complement nucleobase permits transcription or corrects the pathogenic mutation.

136. A method of producing a cell, tissue, or organ for treating SDS in a subject in need thereof by correcting a pathogenic mutation in an SBDS gene of the cell, tissue, or organ, the method comprising:
contacting the cell, tissue, or organ with a base editor, wherein the base editor comprises:
(i) a polynucleotide-programmable DNA-binding domain, and
(ii) a deaminase domain capable of deaminating the pathogenic mutation or its complement nucleobase; and
contacting the cell, tissue, or organ with a guide polynucleotide, wherein the guide polynucleotide targets the base editor to a target nucleotide sequence at least a portion of which is located in the gene or its reverse complement; and
editing the pathogenic mutation by deaminating the mutation or its complement nucleobase upon targeting of the base editor to the target nucleotide sequence,
wherein deaminating the pathogenic mutation or its complement nucleobase permits splicing, thereby producing the cell, tissue, or organ for treating SDS.

137-157. (canceled)

158. A method of treating Shwachman Diamond Syndrome (SDS) in a subject in need thereof, the method comprising administering to the subject the cell of claim 45.

159-163. (canceled)

164. A composition comprising a base editor bound to a guide RNA, wherein the guide RNA comprises a nucleic acid sequence that is complementary to an SBDS gene associated with Shwachman Diamond Syndrome (SDS).

165-180. (canceled)

181. A pharmaceutical composition comprising (i) a nucleic acid encoding a base editor; and (ii) the guide RNA of claim 125.

182-185. (canceled)

The application's sequence listing, which the Patent Office published only in electronic form, follows.

SEQUENCE LISTING (234 sequences)

SEQ ID NO: 1 - DNA, 20 bp, Unknown
  Description of Unknown: target sequence
tgtaaatgtttcctaaggtc

SEQ ID NO: 2 - DNA, 20 bp, Unknown
  Description of Unknown: target sequence
aatgtttcctaaggtcaggt

SEQ ID NO: 3 - RNA, 20 nt, Artificial Sequence
  Description of Artificial Sequence: Synthetic oligonucleotide
uguaaauguuuccuaagguc

SEQ ID NO: 4 - RNA, 20 nt, Artificial Sequence
  Description of Artificial Sequence: Synthetic oligonucleotide
aauguuuccuaaggucaggu

SEQ ID NO: 5 - DNA, 23 bp, Unknown
  Description of Unknown: target sequence
gtaagcaggcgggtaacagctgc

SEQ ID NO: 6 - DNA, 23 bp, Unknown
  Description of Unknown: target sequence
agcaggcgggtaacagctgcagc

SEQ ID NO: 7 - DNA, 23 bp, Unknown
  Description of Unknown: target sequence
gcgggtaacagctgcagcatagc

SEQ ID NO: 8 - DNA, 20 bp, Unknown
  Description of Unknown: target sequence
gtaagcaggcgggtaacagc

SEQ ID NO: 9 - DNA, 20 bp, Unknown
  Description of Unknown: target sequence
agcaggcgggtaacagctgc

SEQ ID NO: 10 - DNA, 20 bp, Unknown
  Description of Unknown: target sequence
gcgggtaacagctgcagcat

SEQ ID NO: 11 - DNA, 19 bp, Unknown
  Description of Unknown: target sequence
gcaggcgggtaacagctgc

SEQ ID NO: 12 - DNA, 18 bp, Unknown
  Description of Unknown: target sequence
caggcgggtaacagctgc

SEQ ID NO: 13 - DNA, 17 bp, Unknown
  Description of Unknown: target sequence
aggcgggtaacagctgc

SEQ ID NO: 14 - DNA, 21 bp, Unknown
  Description of Unknown: target sequence
aagcaggcgggtaacagctgc

SEQ ID NO: 15 - RNA, 20 nt, Artificial Sequence
  Description of Artificial Sequence: Synthetic oligonucleotide
guaagcaggcggguaacagc

SEQ ID NO: 16 - RNA, 20 nt, Artificial Sequence
  Description of Artificial Sequence: Synthetic oligonucleotide
agcaggcggguaacagcugc

SEQ ID NO: 17 - RNA, 19 nt, Artificial Sequence
  Description of Artificial Sequence: Synthetic oligonucleotide
gcggguaacagcugcagca

SEQ ID NO: 18 - RNA, 19 nt, Artificial Sequence
  Description of Artificial Sequence: Synthetic oligonucleotide
gcaggcggguaacagcugc

SEQ ID NO: 19 - RNA, 18 nt, Artificial Sequence
  Description of Artificial Sequence: Synthetic oligonucleotide
caggcggguaacagcugc

SEQ ID NO: 20 - RNA, 17 nt, Artificial Sequence
  Description of Artificial Sequence: Synthetic oligonucleotide
aggcggguaacagcugc

SEQ ID NO: 21 - RNA, 21 nt, Artificial Sequence
  Description of Artificial Sequence: Synthetic oligonucleotide
aagcaggcggguaacagcugc

SEQ ID NO: 22 - RNA, 20 nt, Artificial Sequence
  Description of Artificial Sequence: Synthetic oligonucleotide
gcggguaacagcugcagcau

SEQ ID NO: 23 - protein, 167 aa, Artificial Sequence
  Description of Artificial Sequence: Synthetic polypeptide
MSEVEFSHEYWMRHALTLAKRARDEREVPVGAVLVLNNRVIGEGWNRAIGLHDPTAHAEIMALRQGGLVMQNYRLIDATLYVTFEPCVMCAGAMIHSRIGRVVFGVRNAKTGAAGSLMDVLHYPGMNHRVEITEGILADECAALLCYFFRMPRQVFNAQKKAQSSTD

SEQ ID NO: 24 - protein, 167 aa, Artificial Sequence
  Description of Artificial Sequence: Synthetic polypeptide
MSEVEFSHEYWMRHALTLAKRARDEREVPVGAVLVLNNRVIGEGWNRAIGLHDPTAHAEIMALRQGGLVMQNYRLIDATLYVTFEPCVMCAGAMIHSRIGRVVFGVRNAKTGAAGSLMDVLHYPGMNHRVEITEGILADECAALLCTFFRMPRQVFNAQKKAQSSTD

SEQ ID NO: 25 - protein, 160 aa, Staphylococcus aureus
MGSHMTNDIYFMTLAIEEAKKAAQLGEVPIGAIITKDDEVIARAHNLRETLQQPTAHAEHIAIERAAKVLGSWRLEGCTLYVTLEPCVMCAGTIVMSRIPRVVYGADDPKGGCSGSLMNLLQQSNFNHRAIVDKGVLKEACSTLLTTFFKNLRANKKSTN

SEQ ID NO: 26 - protein, 161 aa, Bacillus subtilis
MTQDELYMKEAIKEAKKAEEKGEVPIGAVLVINGEIIARAHNLRETEQRSIAHAEMLVIDEACKALGTWRLEGATLYVTLEPCPMCAGAVVLSRVEKVVFGAFDPKGGCSGTLMNLLQEERFNHQAEVVSGVLEEECGGMLSAFFRELRKKKKAARKNLSE

SEQ ID NO: 27 - protein, 183 aa, Salmonella typhimurium
MPPAFITGVTSLSDVELDHEYWMRHALTLAKRAWDEREVPVGAVLVHNHRVIGEGWNRPIGRHDPTAHAEIMALRQGGLVLQNYRLLDTTLYVTLEPCVMCAGAMVHSRIGRVVFGARDAKTGAAGSLIDVLHHPGMNHRVEIIEGVLRDECATLLSDFFRMRRQEIKALKKADRAEGAGPAV

SEQ ID NO: 28 - protein, 164 aa, Shewanella putrefaciens
MDEYWMQVAMQMAEKAEAAGEVPVGAVLVKDGQQIATGYNLSISQHDPTAHAEILCLRSAGKKLENYRLLDATLYITLEPCAMCAGAMVHSRIARVVYGARDEKTGAAGTVVNLLQHPAFNHQVEVTSGVLAEACSAQLSRFFKRRRDEKKALKLAQRAQQGIE

SEQ ID NO: 29 - protein, 173 aa, Haemophilus influenzae
MDAAKVRSEFDEKMMRYALELADKAEALGEIPVGAVLVDDARNIIGEGWNLSIVQSDPTAHAEIIALRNGAKNIQNYRLLNSTLYVTLEPCTMCAGAILHSRIKRLVFGASDYKTGAIGSRFHFFDDYKMNHTLEITSGVLAEECSQKLSTFFQKRREEKKIEKALLKSLSDK

SEQ ID NO: 30 - protein, 161 aa, Caulobacter crescentus
MRTDESEDQDHRMMRLALDAARAAAEAGETPVGAVILDPSTGEVIATAGNGPIAAHDPTAHAEIAAMRAAAAKLGNYRLTDLTLVVTLEPCAMCAGAISHARIGRVVFGADDPKGGAVVHGPKFFAQPTCHWRPEVTGGVLADESADLLRGFFRARRKAKI

SEQ ID NO: 31 - protein, 179 aa, Geobacter sulfurreducens
MSSLKKTPIRDDAYWMGKAIREAAKAAARDEVPIGAVIVRDGAVIGRGHNLREGSNDPSAHAEMIAIRQAARRSANWRLTGATLYVTLEPCLMCMGAIILARLERVVFGCYDPKGGAAGSLYDLSADPRLNHQVRLSPGVCQEECGTMLSDFFRDLRRRKKAKATPALFIDERKVPPEP

SEQ ID NO: 32 - protein, 1410 aa, Artificial Sequence
  Description of Artificial Sequence: Synthetic polypeptide
EIGKATAKYFFYSNIMNFFKTEITLANGEIRKRPLIETNGETGEIVWDKGRDFATVRKVLSMPQVNIVKKTEVQTGGFSKESILPKRNSDKLIARKKDWDPKKYGGFMQPTVAYSVLVVAKVEKGKSKKLKSVKELLGITIMERSSFEKNPIDFLEAKGYKEVKKDLIIKLPKYSLFELENGRKRMLASAKFLQKGNELALPSKYVNFLYLASHYEKLKGSPEDNEQKQLFVEQHKHYLDEIIEQISEFSKRVILADANLDKVLSAYNKHRDKPIREQAENIIHLFTLTNLGAPRAFKYFDTTIARKEYRSTKEVLDATLIHQSITGLYETRIDLSQLGGDGGSGGSGGSGGSGGSGGSGGMDKKYSIGLAIGTNSVGWAVITDEYKVPSKKFKVLGNTDRHSIKKNLIGALLFDSGETAEATRLKRTARRRYTRRKNRICYLQEIFSNEMAKVDDSFFHRLEESFLVEEDKKHERHPIFGNIVDEVAYHEKYPTIYHLRKKLVDSTDKADLRLIYLALAHMIKFRGHFLIEGDLNPDNSDVDKLFIQLVQTYNQLFEENPINASGVDAKAILSARLSKSRRLENLIAQLPGEKKNGLFGNLIALSLGLTPNFKSNFDLAEDAKLQLSKDTYDDDLDNLLAQIGDQYADLFLAAKNLSDAILLSDILRVNTEITKAPLSASMIKRYDEHHQDLTLLKALVRQQLPEKYKEIFFDQSKNGYAGYIDGGASQEEFYKFIKPILEKMDGTEELLVKLNREDLLRKQRTFDNGSIPHQIHLGELHAILRRQEDFYPFLKDNREKIEKILTFRIPYYVGPLARGNSRFAWMTRKSEETITPWNFEEVVDKGASAQSFIERMTNFDKNLPNEKVLPKHSLLYEYFTVYNELTKVKYVTEGMRKPAFLSGEQKKAIVDLLFKTNRKVTVKQLKEDYFKKIECFDSVEISGVEDRFNASLGTYHDLLKIIKDKDFLDNEENEDILEDIVLTLTLFEDREMIEERLKTYAHLFDDKVMKQLKRRRYTGWGRLSRKLINGIRDKQSGKTILDFLKSDGFANRNFMQLIHDDSLTFKEDIQKAQVSGQGDSLHEHIANLAGSPAIKKGILQTVKVVDELVKVMGRHKPENIVIEMARENQTTQKGQKNSRERMKRIEEGIKELGSQILKEHPVENTQLQNEKLYLYYLQNGRDMYVDQELDINRLSDYDVDHIVPQSFLKDDSIDNKVLTRSDKNRGKSDNVPSEEVVKKMKNYWRQLLNAKLITQRKFDNLTKAERGGLSELDKAGFIKRQLVETRQITKHVAQILDSRMNTKYDENDKLIREVKVITLKSKLVSDFRKDFQFYKVREINNYHHAHDAYLNAVVGTALIKKYPKLESEFVYGDYKVYDVRKMIAKSEQEGADKRTADGSEFESPKKKRKV

SEQ ID NO: 33 - DNA, 8811 bp, Artificial Sequence
  Description of Artificial Sequence: Synthetic polynucleotide
atatgccaagtacgccccctattgacgtcaatgacggtaaatggcccgcctggcattatgcccagtacatgaccttatgggactttcctacttggcagtacatctacgtattagtcatcgctattaccatggtgatgcggttttggcagtacatcaatgggcgtggatagcggtttgactcacggggatttccaagtctccaccccattgacgtcaatgggagtttgttttggcaccaaaatcaacgggactttccaaaatgtcgtaacaactccgccccattgacgcaaatgggcggtaggcgtgtacggtgggaggtctatataagcagagctggtttagtgaaccgtcagatccgctagagatccgcggccgctaatacgactcactatagggagagccgccaccatgaaacggacagccgacggaagcgagttcgagtcaccaaagaagaagcggaaagtctctgaagtcgagtttagccacgagtattggatgaggcacgcactgaccctggcaaagcgagcatgggatgaaagagaagtccccgtgggcgccgtgctggtgcacaacaatagagtgatcggagagggatggaacaggccaatcggccgccacgaccctaccgcacacgcagagatcatggcactgaggcagggaggcctggtcatgcagaattaccgcctgatcgatgccaccctgtatgtgacactggagccatgcgtgatgtgcgcaggagcaatgatccacagcaggatcggaagagtggtgttcggagcacgggacgccaagaccggcgcagcaggctccctgatggatgtgctgcaccaccccggcatgaaccaccgggtggagatcacagagggaatcctggcagacgagtgcgccgccctgctgagcgatttctttagaatgcggagacaggagatcaaggcccagaagaaggcacagagctccaccgactctggaggatctagcggaggatcctctggaagcgagacaccaggcacaagcgagtccgccacaccagagagctccggcggctcctccggaggatcctctgaggtggagttttcccacgagtactggatgagacatgccctgaccctggccaagagggcacgcgatgagagggaggtgcctgtgggagccgtgctggtgctgaacaatagagtgatcggcgagggctggaacagagccatcggcctgcacgacccaacagcccatgccgaaattatggccctgagacagggcggcctggtcatgcagaactacagactgattgacgccaccctgtacgtgacattcgagccttgcgtgatgtgcgccggcgccatgatccactctaggatcggccgcgtggtgtttggcgtgaggaacgcaaaaaccggcgccgcaggctccctgatggacgtgctgcactaccccggcatgaatcaccgcgtcgaaattaccgagggaatcctggcagatgaatgtgccgccctgctgtgctatttctttcggatgcctagacaggtgttcaatgctcagaagaaggcccagagctccaccgactccggaggatctagcggaggctcctctggctctgagacacctggcacaagcgagagcgcaacacctgaaagcagcgggggcagcagcggggggtcagacaagaagtacagcatcggcctggccatcggcaccaactctgtgggctgggccgtgatcaccgacgagtacaaggtgcccagcaagaaattcaaggtgctgggcaacaccgaccggcacagcatcaagaagaacctgatcggagccctgctgttcgacagcggcgaaacagccgaggccacccggctgaagagaaccgccagaagaagatacaccagacggaagaaccggatctgctatctgcaagagatcttcagcaacgagatggccaaggtggacgacagcttcttccacagactggaagagtccttcctggtggaagaggataagaagcacgagcggcaccccatcttcggcaacatcgtggacgaggtggcctaccacgagaagtaccccaccatctaccacctgagaaagaaactggtggacagcaccgacaaggccgacctgcggctgatctatctggccctggcccacatgatcaagttccggggccacttcctgatcgagggcgacctgaaccccgacaacagcgacgtggacaagctgttcatccagctggtgcagacctacaaccagctgttcgaggaaaaccccatcaacgccagcggcgtggacgccaaggccatcctgtctgccagactgagcaagagcagacggctggaaaatctgatcgcccagctgcccggcgagaagaagaatggcctgttcggaaacctgattgccctgagcctgggcctgacccccaacttcaagagcaacttcgacctggccgaggatgccaaactgcagctgagcaaggacacctacgacgacgacctggacaacctgctggcccagatcggcgaccagtacgccgacctgtttctggccgccaagaacctgtccgacgccatcctgctgagcgacatcctgagagtgaacaccgagatcaccaaggcccccctgagcgcctctatgatcaagagatacgacgagcaccaccaggacctgaccctgctgaaagctctcgtgcggcagcagctgcctgagaagtacaaagagattttcttcgaccagagcaagaacggctacgccggctacattgacggcggagccagccaggaagagttctacaagttcatcaagcccatcctggaaaagatggacggcaccgaggaactgctcgtgaagctgaacagagaggacctgctgcggaagcagcggaccttcgacaacggcagcatcccccaccagatccacctgggagagctgcacgccattctgcggcggcaggaagatttttacccattcctgaaggacaaccgggaaaagatcgagaagatcctgaccttccgcatcccctactacgtgggccctctggccaggggaaacagcagattcgcctggatgaccagaaagagcgaggaaaccatcaccccctggaacttcgaggaagtggtggacaagggcgcttccgcccagagcttcatcgagcggatgaccaacttcgataagaacctgcccaacgagaaggtgctgcccaagcacagcctgctgtacgagtacttcaccgtgtataacgagctgaccaaagtgaaatacgtgaccgagggaatgagaaagcccgccttcctgagcggcgagcagaaaaaggccatcgtggacctgctgttcaagaccaaccggaaagtgaccgtgaagcagctgaaagaggactacttcaagaaaatcgagtgcttcgactccgtggaaatctccggcgtggaagatcggttcaacgcctccctgggcacataccacgatctgctgaaaattatcaaggacaaggacttcctggacaatgaggaaaacgaggacattctggaagatatcgtgctgaccctgacactgtttgaggacagagagatgatcgaggaacggctgaaaacctatgcccacctgttcgacgacaaagtgatgaagcagctgaagcggcggagatacaccggctggggcaggctgagccggaagctgatcaacggcatccgggacaagcagtccggcaagacaatcctggatttcctgaagtccgacggcttcgccaacagaaacttcatgcagctgatccacgacgacagcctgacctttaaagaggacatccagaaagcccaggtgtccggccagggcgatagcctgcacgagcacattgccaatctggccggcagccccgccattaagaagggcatcctgcagacagtgaaggtggtggacgagctcgtgaaagtgatgggccggcacaagcccgagaacatcgtgatcgaaatggccagagagaaccagaccacccagaagggacagaagaacagccgcgagagaatgaagcggatcgaagagggcatcaaagagctgggcagccagatcctgaaagaacaccccgtggaaaacacccagctgcagaacgagaagctgtacctgtactacctgcagaatgggcgggatatgtacgtggaccaggaactggacatcaaccggctgtccgactacgatgtggaccatatcgtgcctcagagctttctgaaggacgactccatcgacaacaaggtgctgaccagaagcgacaagaaccggggcaagagcgacaacgtgccctccgaagaggtcgtgaagaagatgaagaactactggcggcagctgctgaacgccaagctgattacccagagaaagttcgacaatctgaccaaggccgagagaggcggcctgagcgaactggataaggccggcttcatcaagagacagctggtggaaacccggcagatcacaaagcacgtggcacagatcctggactcccggatgaacactaagtacgacgagaatgacaagctgatccgggaagtgaaagtgatcaccctgaagtccaagctggtgtccgatttccggaaggatttccagttttacaaagtgcgcgagatcaacaactaccaccacgcccacgacgcctacctgaacgccgtcgtgggaaccgccctgatcaaaaagtaccctaagctggaaagcgagttcgtgtacggcgactacaaggtgtacgacgtgcggaagatgatcgccaagagcgagcaggaaatcggcaaggctaccgccaagtacttcttctacagcaacatcatgaactttttcaagaccgagattaccctggccaacggcgagatccggaagcggcctctgatcgagacaaacggcgaaaccggggagatcgtgtgggataagggccgggattttgccaccgtgcggaaagtgctgagcatgccccaagtgaatatcgtgaaaaagaccgaggtgcagacaggcggcttcagcaaagagtctatcctgcccaagaggaacagcgataagctgatcgccagaaagaaggactgggaccctaagaagtacggcggcttcgacagccccaccgtggcctattctgtgctggtggtggccaaagtggaaaagggcaagtccaagaaactgaagagtgtgaaagagctgctggggatcaccatcatggaaagaagcagcttcgagaagaatcccatcgactttctggaagccaagggctacaaagaagtgaaaaaggacctgatcatcaagctgcctaagtactccctgttcgagctggaaaacggccggaagagaatgctggcctctgccggcgaactgcagaagggaaacgaactggccctgccctccaaatatgtgaacttcctgtacctggccagccactatgagaagctgaagggctcccccgaggataatgagcagaaacagctgtttgtggaacagcacaagcactacctggacgagatcatcgagcagatcagcgagttctccaagagagtgatcctggccgacgctaatctggacaaagtgctgtccgcctacaacaagcaccgggataagcccatcagagagcaggccgagaatatcatccacctgtttaccctgaccaatctgggagcccctgccgccttcaagtactttgacaccaccatcgaccggaagaggtacaccagcaccaaagaggtgctggacgccaccctgatccaccagagcatcaccggcctgtacgagacacggatcgacctgtctcagctgggaggtgactctggcggctcaaaaagaaccgccgacggcagcgaattcgagcccaagaagaagaggaaagtctaaccggtcatcatcaccatcaccattgagtttaaacccgctgatcagcctcgactgtgccttctagttgccagccatctgttgtttgcccctcccccgtgccttccttgaccctggaaggtgccactcccactgtcctttcctaataaaatgaggaaattgcatcgcattgtctgagtaggtgtcattctattctggggggtggggtggggcaggacagcaagggggaggattgggaagacaatagcaggcatgctggggatgcggtgggctctatggcttctgaggcggaaagaaccagctggggctcgataccgtcgacctctagctagagcttggcgtaatcatggtcatagctgtttcctgtgtgaaattgttatccgctcacaattccacacaacatacgagccggaagcataaagtgtaaagcctagggtgcctaatgagtgagctaactcacattaattgcgttgcgctcactgcccgctttccagtcgggaaacctgtcgtgccagctgcattaatgaatcggccaacgcgcggggagaggcggtttgcgtattgggcgctcttccgcttcctcgctcactgactcgctgcgctcggtcgttcggctgcggcgagcggtatcagctcactcaaaggcggtaatacggttatccacagaatcaggggataacgcaggaaagaacatgtgagcaaaaggccagcaaaaggccaggaaccgtaaaaaggccgcgttgctggcgtttttccataggctccgcccccctgacgagcatcacaaaaatcgacgctcaagtcagaggtggcgaaacccgacaggactataaagataccaggcgtttccccctggaagctccctcgtgcgctctcctgttccgaccctgccgcttaccggatacctgtccgcctttctcccttcgggaagcgtggcgctttctcatagctcacgctgtaggtatctcagttcggtgtaggtcgttcgctccaagctgggctgtgtgcacgaaccccccgttcagcccgaccgctgcgccttatccggtaactatcgtcttgagtccaacccggtaagacacgacttatcgccactggcagcagccactggtaacaggattagcagagcgaggtatgtaggcggtgctacagagttcttgaagtggtggcctaactacggctacactagaagaacagtatttggtatctgcgctctgctgaagccagttaccttcggaaaaagagttggtagctcttgatccggcaaacaaaccaccgctggtagcggtggtttttttgtttgcaagcagcagattacgcgcagaaaaaaaggatctcaagaagatcctttgatcttttctacggggtctgacactcagtggaacgaaaactcacgttaagggattttggtcatgagattatcaaaaaggatcttcacctagatccttttaaattaaaaatgaagttttaaatcaatctaaagtatatatgagtaaacttggtctgacagttaccaatgcttaatcagtgaggcacctatctcagcgatctgtctatttcgttcatccatagttgcctgactccccgtcgtgtagataactacgatacgggagggcttaccatctggccccagtgctgcaatgataccgcgagacccacgctcaccggctccagatttatcagcaataaaccagccagccggaagggccgagcgcagaagtggtcctgcaactttatccgcctccatccagtctattaattgttgccgggaagctagagtaagtagttcgccagttaatagtttgcgcaacgttgttgccattgctacaggcatcgtggtgtcacgctcgtcgtttggtatggcttcattcagctccggttcccaacgatcaaggcgagttacatgatcccccatgttgtgcaaaaaagcggttagctccttcggtcctccgatcgttgtcagaagtaagttggccgcagtgttatcactcatggttatggcagcactgcataattctcttactgtcatgccatccgtaagatgcttttctgtgactggtgagtactcaaccaagtcattctgagaatagtgtatgcggcgaccgagttgctcttgcccggcgtcaatacgggataataccgcgccacatagcagaactttaaaagtgctcatcattggaaaacgttcttcggggcgaaaactctcaaggatcttaccgctgttgagatccagttcgatgtaacccactcgtgcacccaactgatcttcagcatcttttactttcaccagcgtttctgggtgagcaaaaacaggaaggcaaaatgccgcaaaaaagggaataagggcgacacggaaatgttgaatactcatactcttcctttttcaatattattgaagcatttatcagggttattgtctcatgagcggatacatatttgaatgtatttagaaaaataaacaaataggggttccgcgcacatttccccgaaaagtgccacctgacgtcgacggatcgggagatcgatctcccgatcccctagggtcgactctcagtacaatctgctctgatgccgcatagttaagccagtatctgctccctgcttgtgtgttggaggtcgctgagtagtgcgcgagcaaaatttaagctacaacaaggcaaggcttgaccgacaattgcatgaagaatctgcttagggttaggcgttttgcgctgcttcgcgatgtacgggccagatatacgcgttgacattgattattgactagttattaatagtaatcaattacggggtcattagttcatagcccatatatggagttccgcgttacataacttacggtaaatggcccgcctggctgaccgcccaacgacccccgcccattgacgtcaataatgacgtatgttcccatagtaacgccaatagggactttccattgacgtcaatgggtggagtatttacggtaaactgcccacttggcagtacatcaagtgtatc

SEQ ID NO: 34 - DNA, 8877 bp, Artificial Sequence
  Description of Artificial Sequence: Synthetic polynucleotide
atatgccaagtacgccccctattgacgtcaatgacggtaaatggcccgcctggcattatgcccagtacatgaccttatgggactttcctacttggcagtacatctacgtattagtcatcgctattaccatggtgatgcggttttggcagtacatcaatgggcgtggatagcggtttgactcacggggatttccaagtctccaccccattgacgtcaatgggagtttgttttggcaccaaaatcaacgggactttccaaaatgtcgtaacaactccgccccattgacgcaaatgggcggtaggcgtgtacggtgggaggtctatataagcagagctggtttagtgaaccgtcagatccgctagagatccgcggccgctaatacgactcactatagggagagccgccaccatgagctcagagactggcccagtggctgtggaccccacattgagacggcggatcgagccccatgagtttgaggtattcttcgatccgagagagctccgcaaggagacctgcctgctttacgaaattaattgggggggccggcactccatttggcgacatacatcacagaacactaacaagcacgtcgaagtcaacttcatcgagaagttcacgacagaaagatatttctgtccgaacacaaggtgcagcattacctggtttctcagctggagcccatgcggcgaatgtagtagggccatcactgaattcctgtcaaggtatccccacgtcactctgtttatttacatcgcaaggctgtaccaccacgctgacccccgcaatcgacaaggcctgcgggatttgatctcttcaggtgtgactatccaaattatgactgagcaggagtcaggatactgctggagaaactttgtgaattatagcccgagtaatgaagcccactggcctaggtatccccatctgtgggtacgactgtacgttcttgaactgtactgcatcatactgggcctgcctccttgtctcaacattctgagaaggaagcagccacagctgacattctttaccatcgctcttcagtcttgtcattaccagcgactgcccccacacattctctgggccaccgggttgaaatctggtggttcttctggtggttctagcggcagcgagactcccgggacctcagagtccgccacacccgaaagttctggtggttcttctggtggttctgataaaaagtattctattggtttagccatcggcactaattccgttggatgggctgtcataaccgatgaatacaaagtaccttcaaagaaatttaaggtgttggggaacacagaccgtcattcgattaaaaagaatcttatcggtgccctcctattcgatagtggcgaaacggcagaggcgactcgcctgaaacgaaccgctcggagaaggtatacacgtcgcaagaaccgaatatgttacttacaagaaatttttagcaatgagatggccaaagttgacgattctttctttcaccgtttggaagagtccttccttgtcgaagaggacaagaaacatgaacggcaccccatctttggaaacatagtagatgaggtggcatatcatgaaaagtacccaacgatttatcacctcagaaaaaagctagttgactcaactgataaagcggacctgaggttaatctacttggctcttgcccatatgataaagttccgtgggcactttctcattgagggtgatctaaatccggacaactcggatgtcgacaaactgttcatccagttagtacaaacctataatcagttgtttgaagagaaccctataaatgcaagtggcgtggatgcgaaggctattcttagcgcccgcctctctaaatcccgacggctagaaaacctgatcgcacaattacccggagagaagaaaaatgggttgttcggtaaccttatagcgctctcactaggcctgacaccaaattttaagtcgaacttcgacttagctgaagatgccaaattgcagcttagtaaggacacgtacgatgacgatctcgacaatctactggcacaaattggagatcagtatgcggacttatttttggctgccaaaaaccttagcgatgcaatcctcctatctgacatactgagagttaatactgagattaccaaggcgccgttatccgcttcaatgatcaaaaggtacgatgaacatcaccaagacttgacacttctcaaggccctagtccgtcagcaactgcctgagaaatataaggaaatattctttgatcagtcgaaaaacgggtacgcaggttatattgacggcggagcgagtcaagaggaattctacaagtttatcaaacccatattagagaagatggatgggacggaagagttgcttgtaaaactcaatcgcgaagatctactgcgaaagcagcggactttcgacaacggtagcattccacatcaaatccacttaggcgaattgcatgctatacttagaaggcaggaggatttttatccgttcctcaaagacaatcgtgaaaagattgagaaaatcctaacctttcgcataccttactatgtgggacccctggcccgagggaactctcggttcgcatggatgacaagaaagtccgaagaaacgattactccatggaattttgaggaagttgtcgataaaggtgcgtcagctcaatcgttcatcgagaggatgaccaactttgacaagaatttaccgaacgaaaaagtattgcctaagcacagtttactttacgagtatttcacagtgtacaatgaactcacgaaagttaagtatgtcactgagggcatgcgtaaacccgcctttctaagcggagaacagaagaaagcaatagtagatctgttattcaagaccaaccgcaaagtgacagttaagcaattgaaagaggactactttaagaaaattgaatgcttcgattctgtcgagatctccggggtagaagatcgatttaatgcgtcacttggtacgtatcatgacctcctaaagataattaaagataaggacttcctggataacgaagagaatgaagatatcttagaagatatagtgttgactcttaccctctttgaagatcgggaaatgattgaggaaagactaaaaacatacgctcacctgttcgacgataaggttatgaaacagttaaagaggcgtcgctatacgggctggggacgattgtcgcggaaacttatcaacgggataagagacaagcaaagtggtaaaactattctcgattttctaaagagcgacggcttcgccaataggaactttatgcagctgatccatgatgactctttaaccttcaaagaggatatacaaaaggcacaggtttccggacaaggggactcattgcacgaacatattgcgaatcttgctggttcgccagccatcaaaaagggcatactccagacagtcaaagtagtggatgagctagttaaggtcatgggacgtcacaaaccggaaaacattgtaatcgagatggcacgcgaaaatcaaacgactcagaaggggcaaaaaaacagtcgagagcggatgaagagaatagaagagggtattaaagaactgggcagccagatcttaaaggagcatcctgtggaaaatacccaattgcagaacgagaaactttacctctattacctacaaaatggaagggacatgtatgttgatcaggaactggacataaaccgtttatctgattacgacgtcgatcacattgtaccccaatcctttttgaaggacgattcaatcgacaataaagtgcttacacgctcggataagaaccgagggaaaagtgacaatgttccaagcgaggaagtcgtaaagaaaatgaagaactattggcggcagctcctaaatgcgaaactgataacgcaaagaaagttcgataacttaactaaagctgagaggggtggcttgtctgaacttgacaaggccggatttattaaacgtcagctcgtggaaacccgccaaatcacaaagcatgttgcacagatactagattcccgaatgaatacgaaatacgacgagaacgataagctgattcgggaagtcaaagtaatcactttaaagtcaaaattggtgtcggacttcagaaaggattttcaattctataaagttagggagataaataactaccaccatgcgcacgacgcttatcttaatgccgtcgtagggaccgcactcattaagaaatacccgaagctagaaagtgagtttgtgtatggtgattacaaagtttatgacgtccgtaagatgatcgcgaaaagcgaacaggagataggcaaggctacagccaaatacttcttttattctaacattatgaatttctttaagacggaaatcactctggcaaacggagagatacgcaaacgacctttaattgaaaccaatggggagacaggtgaaatcgtatgggataagggccgggacttcgcgacggtgagaaaagttttgtccatgccccaagtcaacatagtaaagaaaactgaggtgcagaccggagggttttcaaaggaatcgattcttccaaaaaggaatagtgataagctcatcgctcgtaaaaaggactgggacccgaaaaagtacggtggcttcgatagccctacagttgcctattctgtcctagtagtggcaaaagttgagaagggaaaatccaagaaactgaagtcagtcaaagaattattggggataacgattatggagcgctcgtcttttgaaaagaaccccatcgacttccttgaggcgaaaggttacaaggaagtaaaaaaggatctcataattaaactaccaaagtatagtctgtttgagttagaaaatggccgaaaacggatgttggctagcgccggagagcttcaaaaggggaacgaactcgcactaccgtctaaatacgtgaatttcctgtatttagcgtcccattacgagaagttgaaaggttcacctgaagataacgaacagaagcaactttttgttgagcagcacaaacattatctcgacgaaatcatagagcaaatttcggaattcagtaagagagtcatcctagctgatgccaatctggacaaagtattaagcgcatacaacaagcacagggataaacccatacgtgagcaggcggaaaatattatccatttgtttactcttaccaacctcggcgctccagccgcattcaagtattttgacacaacgatagatcgcaaacgatacacttctaccaaggaggtgctagacgcgacactgattcaccaatccatcacgggattatatgaaactcggatagatttgtcacagcttgggggtgactctggtggttctggaggatctggtggttctactaatctgtcagatattattgaaaaggagaccggtaagcaactggttatccaggaatccatcctcatgctcccagaggaggtggaagaagtcattgggaacaagccggaaagcgatatactcgtgcacaccgcctacgacgagagcaccgacgagaatgtcatgcttctgactagcgacgcccctgaatacaagccttgggctctggtcatacaggatagcaacggtgagaacaagattaagatgctctctggtggttctggaggatctggtggttctactaatctgtcagatattattgaaaaggagaccggtaagcaactggttatccaggaatccatcctcatgctcccagaggaggtggaagaagtcattgggaacaagccggaaagcgatatactcgtgcacaccgcctacgacgagagcaccgacgagaatgtcatgcttctgactagcgacgcccctgaatacaagccttgggctctggtcatacaggatagcaacggtgagaacaagattaagatgctctctggtggttctcccaagaagaagaggaaagtctaaccggtcatcatcaccatcaccattgagtttaaacccgctgatcagcctcgactgtgccttctagttgccagccatctgttgtttgcccctcccccgtgccttccttgaccctggaaggtgccactcccactgtcctttcctaataaaatgaggaaattgcatcgcattgtctgagtaggtgtcattctattctggggggtggggtggggcaggacagcaagggggaggattgggaagacaatagcaggcatgctggggatgcggtgggctctatggcttctgaggcggaaagaaccagctggggctcgataccgtcgacctctagctagagcttggcgtaatcatggtcatagctgtttcctgtgtgaaattgttatccgctcacaattccacacaacatacgagccggaagcataaagtgtaaagcctagggtgcctaatgagtgagctaactcacattaattgcgttgcgctcactgcccgctttccagtcgggaaacctgtcgtgccagctgcattaatgaatcggccaacgcgcggggagaggcggtttgcgtattgggcgctcttccgcttcctcgctcactgactcgctgcgctcggtcgttcggctgcggcgagcggtatcagctcactcaaaggcggtaatacggttatccacagaatcaggggataacgcaggaaagaacatgtgagcaaaaggccagcaaaaggccaggaaccgtaaaaaggccgcgttgctggcgtttttccataggctccgcccccctgacgagcatcacaaaaatcgacgctcaagtcagaggtggcgaaacccgacaggactataaagataccaggcgtttccccctggaagctccctcgtgcgctctcctgttccgaccctgccgcttaccggatacctgtccgcctttctcccttcgggaagcgtggcgctttctcatagctcacgctgtaggtatctcagttcggtgtaggtcgttcgctccaagctgggctgtgtgcacgaaccccccgttcagcccgaccgctgcgccttatccggtaactatcgtcttgagtccaacccggtaagacacgacttatcgccactggcagcagccactggtaacaggattagcagagcgaggtatgtaggcggtgctacagagttcttgaagtggtggcctaactacggctacactagaagaacagtatttggtatctgcgctctgctgaagccagttaccttcggaaaaagagttggtagctcttgatccggcaaacaaaccaccgctggtagcggtggtttttttgtttgcaagcagcagattacgcgcagaaaaaaaggatctcaagaagatcctttgatcttttctacggggtctgacgctcagtggaacgaaaactcacgttaagggattttggtcatgagattatcaaaaaggatcttcacctagatccttttaaattaaaaatgaagttttaaatcaatctaaagtatatatgagtaaacttggtctgacagttaccaatgcttaatcagtgaggcacctatctcagcgatctgtctatttcgttcatccatagttgcctgactccccgtcgtgtagataactacgatacgggagggcttaccatctggccccagtgctgcaatgataccgcgagacccacgctcaccggctccagatttatcagcaataaaccagccagccggaagggccgagcgcagaagtggtcctgcaactttatccgcctccatccagtctattaattgttgccgggaagctagagtaagtagttcgccagttaatagtttgcgcaacgttgttgccattgctacaggcatcgtggtgtcacgctcgtcgtttggtatggcttcattcagctccggttcccaacgatcaaggcgagttacatgatcccccatgttgtgcaaaaaagcggttagctccttcggtcctccgatcgttgtcagaagtaagttggccgcagtgttatcactcatggttatggcagcactgcataattctcttactgtcatgccatccgtaagatgcttttctgtgactggtgagtactcaaccaagtcattctgagaatagtgtatgcggcgaccgagttgctcttgcccggcgtcaatacgggataataccgcgccacatagcagaactttaaaagtgctcatcattggaaaacgttcttcggggcgaaaactctcaaggatcttaccgctgttgagatccagttcgatgtaacccactcgtgcacccaactgatcttcagcatcttttactttcaccagcgtttctgggtgagcaaaaacaggaaggcaaaatgccgcaaaaaagggaataagggcgacacggaaatgttgaatactcatactcttcctttttcaatattattgaagcatttatcagggttattgtctcatgagcggatacatatttgaatgtatttagaaaaataaacaaataggggttccgcgcacatttccccgaaaagtgccacctgacgtcgacggatcgggagatcgatctcccgatcccctagggtcgactctcagtacaatctgctctgatgccgcatagttaagccagtatctgctccctgcttgtgtgttggaggtcgctgagtagtgcgcgagcaaaatttaagctacaacaaggcaaggcttgaccgacaattgcatgaagaatctgcttagggttaggcgttttgcgctgcttcgcgatgtacgggccagatatacgcgttgacattgattattgactagttattaatagtaatcaattacggggtcattagttcatagcccatatatggagttccgcgttacataacttacggtaaatggcccgcctggctgaccgcccaacgacccccgcccattgacgtcaataatgacgtatgttcccatagtaacgccaatagggactttccattgacgtcaatgggtggagtatttacggtaaactgcccacttggcagtacatcaagtgtatc

SEQ ID NO: 35 - DNA, 5508 bp, Artificial Sequence
  Description of Artificial Sequence: Synthetic polynucleotide
atgagctcagagactggcccagtggctgtggaccccacattgagacggcggatcgagccccatgagtttgaggtattcttcgatccgagagagctccgcaaggagacctgcctgctttacgaaattaattgggggggccggcactccatttggcgacatacatcacagaacactaacaagcacgtcgaagtcaacttcatcgagaagttcacgacagaaagatatttctgtccgaacacaaggtgcagcattacctggtttctcagctggagccgcgaatgtagtagggccatcactgaattcctgtcaaggtatccccacgtcactctgtttatttacatcgcaaggctgtaccaccacgctgacccccgcaatcgacaaggcctgcgggatttgatctcttcaggtgtgactatccaaattatgactgagcaggagtcaggatactgctggagaaactttgtgaattatagcccgagtaatgaagcccactggcctaggtatccccatctgtgggtacgactgtacgttcttgaactgtactgcatcatactgggcctgcctccttgtctcaacattctgagaaggaagcagccacagctgacattctttaccatcgctcttcagtcttgtcattaccagcgactgcccccacacattctctgggccaccgggttgaaatctggtggttcttctggtggttctagcggcagcgagactcccgggacctcagagtccgccacacccgaaagttctggtggttcttctggtggttctgataaaaagtattctattggtttagccatcggcactaattccgttggatgggctgtcataaccgatgaatacaaagtaccttcaaagaaatttaaggtgttggggaacacagaccgtcattcgattaaaaagaatcttatcggtgccctcctattcgatagtggcgaaacggcagaggcgactcgcctgaaacgaaccgctcggagaaggtatacacgtcgcaagaaccgaatatgttacttacaagaaatttttagcaatgagatggccaaagttgacgattctttctttcaccgtttggaagagtccttccttgtcgaagaggacaagaaacatgaacggcaccccatctttggaaacatagtagatgaggtggcatatcatgaaaagtacccaacgatttatcacctcagaaaaaagctagttgactcaactgataaagcggacctgaggttaatctacttggctcttgcccatatgataaagttccgtgggcactttctcattgagggtgatctaaatccggacaactcggatgtcgacaaactgttcatccagttagtacaaacctataatcagttgtttgaagagaaccctataaatgcaagtggcgtggatgcgaaggctattcttagcgcccgcctctctaaatcccgacggctagaaaacctgatcgcacaattacccggagagaagaaaaatgggttgttcggtaaccttatagcgctctcactaggcctgacaccaaattttaagtcgaacttcgacttagctgaagatgccaaattgcagcttagtaaggacacgtacgatgacgatctcgacaatctactggcacaaattggagatcagtatgcggacttatttttggctgccaaaaaccttagcgatgcaatcctcctatctgacatactgagagttaatactgagattaccaaggcgccgttatccgcttcaatgatcaaaaggtacgatgaacatcaccaagacttgacacttctcaaggccctagtccgtcagcaactgcctgagaaatataaggaaatattctttgatcagtcgaaaaacgggtacgcaggttatattgacggcggagcgagtcaagaggaattctacaagtttatcaaacccatattagagaagatggatgggacggaagagttgcttgtaaaactcaatcgcgaagatctactgcgaaagcagcggactttcgacaacggtagcattccacatcaaatccacttaggcgaattgcatgctatacttagaaggcaggaggatttttatccgttcctcaaagacaatcgtgaaaagattgagaaaatcctaacctttcgcataccttactatgtgggacccctggcccgagggaactctcggttcgcatggatgacaagaaagtccgaagaaacgattactccatggaattttgaggaagttgtcgataaaggtgcgtcagctcaatcgttcatcgagaggatgaccaactttgacaagaatttaccgaacgaaaaagtattgcctaagcacagtttactttacgagtatttcacagtgtacaatgaactcacgaaagttaagtatgtcactgagggcatgcgtaaacccgcctttctaagcggagaacagaagaaagcaatagtagatctgttattcaagaccaaccgcaaagtgacagttaagcaattgaaagaggactactttaagaaaattgaatgcttcgattctgtcgagatctccggggtagaagatcgatttaatgcgtcacttggtacgtatcatgacctcctaaagataattaaagataaggacttcctggataacgaagagaatgaagatatcttagaagatatagtgttgactcttaccctctttgaagatcgggaaatgattgaggaaagactaaaaacatacgctcacctgttcgacgataaggttatgaaacagttaaagaggcgtcgctatacgggctggggacgattgtcgcggaaacttatcaacgggataagagacaagcaaagtggtaaaactattctcgattttctaaagagcgacggcttcgccaataggaactttatgcagctgatccatgatgactctttaaccttcaaagaggatatacaaaaggcacaggtttccggacaaggggactcattgcacgaacatattgcgaatcttgctggttcgccagccatcaaaaagggcatactccagacagtcaaagtagtggatgagctagttaaggtcatgggacgtcacaaaccggaaaacattgtaatcgagatggcacgcgaaaatcaaacgactcagaaggggcaaaaaaacagtcgagagcggatgaagagaatagaagagggtattaaagaactgggcagccagatcttaaaggagcatcctgtggaaaatacccaattgcagaacgagaaactttacctctattacctacaaaatggaagggacatgtatgttgatcaggaactggacataaaccgtttatctgattacgacgtcgatcacattgtaccccaatcctttttgaaggacgattcaatcgacaataaagtgcttacacgctcggataagaaccgagggaaaagtgacaatgttccaagcgaggaagtcgtaaagaaaatgaagaactattggcggcagctcctaaatgcgaaactgataacgcaaagaaagttcgataacttaactaaagctgagaggggtggcttgtctgaacttgacaaggccggatttattaaacgtcagctcgtggaaacccgccaaatcacaaagcatgttgcacagatactagattcccgaatgaatacgaaatacgacgagaacgataagctgattcgggaagtcaaagtaatcactttaaagtcaaaattggtgtcggacttcagaaaggattttcaattctataaagttagggagataaataactaccaccatgcgcacgacgcttatcttaatgccgtcgtagggaccgcactcattaagaaatacccgaagctagaaagtgagtttgtgtatggtgattacaaagtttatgacgtccgtaagatgatcgcgaaaagcgaacaggagataggcaaggctacagccaaatacttcttttattctaacattatgaatttctttaagacggaaatcactctggcaaacggagagatacgcaaacgacctttaattgaaaccaatggggagacaggtgaaatcgtatgggataagggccgggacttcgcgacggtgagaaaagttttgtccatgccccaagtcaacatagtaaagaaaactgaggtgcagaccggagggttttcaaaggaatcgattcttccaaaaaggaatagtgataagctcatcgctcgtaaaaaggactgggacccgaaaaagtacggtggcttcgatagccctacagttgcctattctgtcctagtagtggcaaaagttgagaagggaaaatccaagaaactgaagtcagtcaaagaattattggggataacgattatggagcgctcgtcttttgaaaagaaccccatcgacttccttgaggcgaaaggttacaaggaagtaaaaaaggatctcataattaaactaccaaagtatagtctgtttgagttagaaaatggccgaaaacggatgttggctagcgccggagagcttcaaaaggggaacgaactcgcactaccgtctaaatacgtgaatttcctgtatttagcgtcccattacgagaagttgaaaggttcacctgaagataacgaacagaagcaactttttgttgagcagcacaaacattatctcgacgaaatcatagagcaaatttcggaattcagtaagagagtcatcctagctgatgccaatctggacaaagtattaagcgcatacaacaagcacagggataaacccatacgtgagcaggcggaaaatattatccatttgtttactcttaccaacctcggcgctccagccgcattcaagtattttgacacaacgatagatcgcaaacgatacacttctaccaaggaggtgctagacgcgacactgattcaccaatccatcacgggattatatgaaactcggatagatttgtcacagcttgggggtgactctggtggttctggaggatctggtggttctactaatctgtcagatattattgaaaaggagaccggtaagcaactggttatccaggaatccatcctcatgctcccagaggaggtggaagaagtcattgggaacaagccggaaagcgatatactcgtgcacaccgcctacgacgagagcaccgacgagaatgtcatgcttctgactagcgacgcccctgaatacaagccttgggctctggtcatacaggatagcaacggtgagaacaagattaagatgctctctggtggttctggaggatctggtggttctactaatctgtcagatattattgaaaaggagaccggtaagcaactggttatccaggaatccatcctcatgctcccagaggaggtggaagaagtcattgggaacaagccggaaagcgatatactcgtgcacaccgcctacgacgagagcaccgacgagaatgtcatgcttctgactagcgacgcccctgaatacaagccttgggctctggtcatacaggatagcaacggtgagaacaagattaagatgctctctggtggttctaaaaggacggcggacggatcagagttcgagagtccgaaaaaaaaacgaaaggtcgaataa

SEQ ID NO: 36 - DNA, 5514 bp, Artificial Sequence
  Description of Artificial Sequence: Synthetic polynucleotide
atgtcatccgaaaccgggccagtggccgtagacccaacactcaggaggcggatagaaccccatgagtttgaagtgttcttcgaccccagagagctgcgcaaagagacttgcctcctgtatgaaataaattgggggggtcgccattcaatttggaggcacactagccagaatactaacaaacacgtggaggtaaattttatcgagaagtttaccaccgaaagatacttttgccccaatacacggtgttcaattacctggtttctgtcatggagtccatgtggagaatgtagtagagcgataactgagttcctgtctcgatatcctcacgtcacgttgtttatatacatcgctcggctttatcaccatgcggacccgcggaacaggcaaggtcttcgggacctcatatcctctggggtgaccatccagataatgacggagcaagagagcggatactgctggcgaaactttgttaactacagcccaagcaatgaggcacactggcctagatatccgcatctctgggttcgactgtatgtccttgaactgtactgcataattctgggacttccgccatgcttgaacattctgcggcggaaacaaccacagctgacctttttcacgattgctctccaaagttgtcactaccagcgattgccaccccacatcttgtgggctactggactcaagtctggaggaagttcaggcggaagcagcgggtctgaaacgcccggaacctcagagagcgcaacgcccgaaagctctggagggtcaagtggtggtagtgataagaaatactccatcggcctcgccatcggtacgaattctgtcggttgggccgttatcaccgatgagtacaaggtcccttctaagaaattcaaggttttgggcaatacagaccgccattctataaaaaaaaacctgatcggcgcccttttgtttgacagtggtgagactgctgaagcgactcgcctgaagcgaactgccaggaggcggtatacgaggcgaaaaaaccgaatttgttacctccaggagattttctcaaatgaaatggccaaggtagatgatagtttttttcaccgcttggaagaaagttttctcgttgaggaggacaaaaagcacgagaggcacccaatctttggcaacatagtcgatgaggtcgcataccatgagaaatatcctacgatctatcatctccgcaagaagctggtcgatagcacggataaagctgacctccggctgatctaccttgctcttgctcacatgattaaattcaggggccatttcctgatagaaggagacctcaatcccgacaattctgatgtcgacaaactgtttattcagctcgttcagacctataatcaactctttgaggagaaccccatcaatgcttcaggggtggacgcaaaggccattttgtccgcgcgcttgagtaaatcacgacgcctcgagaatttgatagctcaactgccgggtgagaagaaaaacgggttgtttgggaatctcatagcgttgagtttgggacttacgccaaactttaagtctaactttgatttggccgaagatgccaaattgcagctgtccaaagatacctatgatgacgacttggataaccttcttgcgcagattggtgaccaatacgcggatctgtttcttgccgcaaaaaatctgtccgacgccatactcttgtccgatatactgcgcgtcaatactgagataactaaggctcccctcagcgcgtccatgattaaaagatacgatgagcaccaccaagatctcactctgttgaaagccctggttcgccagcagcttccagagaagtataaggagatatttttcgaccaatctaaaaacggctatgcgggttacattgacggtggcgcctctcaagaagaattctacaagtttataaagccgatacttgagaaaatggacggtacagaggaattgttggttaagctcaatcgcgaggacttgttgagaaagcagcgcacatttgacaatggtagtattccacaccagattcatctgggcgagttgcatgccattcttagaagacaagaagatttttatccgtttctgaaagataacagagaaaagattgaaaagatacttacctttcgcataccgtattatgtaggtcccctggctagagggaacagtcgcttcgcttggatgactcgaaaatcagaagaaacaataaccccctggaattttgaagaagtggtagataaaggtgcgagtgcccaatcttttattgagcggatgacaaattttgacaagaatctgcctaacgaaaaggtgcttcccaagcattcccttttgtatgaatactttacagtatataatgaactgactaaagtgaagtacgttaccgaggggatgcgaaagccagcttttctcagtggcgagcagaaaaaagcaatagttgacctgctgttcaagacgaataggaaggttaccgtcaaacagctcaaagaagattactttaaaaagatcgaatgttttgattcagttgagataagcggagtagaggatagatttaacgcaagtcttggaacttatcatgaccttttgaagatcatcaaggataaagattttttggacaacgaggagaatgaagatatcctggaagatatagtacttaccttgacgctttttgaagatcgagagatgatcgaggagcgacttaagacgtacgcacatctctttgacgataaggttatgaaacaattgaaacgccggcggtatactggctggggcaggctttctcgaaagctgattaatggtatccgcgataagcagtctggaaagacaatccttgactttctgaaaagtgatggatttgcaaatagaaactttatgcagcttatacatgatgactctttgacgttcaaggaagacatccagaaggcacaggtatccggccaaggggatagcctccatgaacacatagccaacctggccggctcaccagctattaaaaagggaatattgcaaaccgttaaggttgttgacgaactcgttaaggttatgggccgacacaaaccagagaatatcgtgattgagatggctagggagaatcagaccactcaaaaaggtcagaaaaattctcgcgaaaggatgaagcgaattgaagagggaatcaaagaacttggctctcaaattttgaaagagcacccggtagaaaacactcagctgcagaatgaaaagctgtatctgtattatctgcagaatggtcgagatatgtacgttgatcaggagctggatatcaataggctcagtgactacgatgtcgaccacatcgttcctcaatctttcctgaaagatgactctatcgacaacaaagtgttgacgcgatcagataagaaccggggaaaatccgacaatgtaccctcagaagaagttgtcaagaagatgaaaaactattggagacaattgctgaacgccaagctcataacacaacgcaagttcgataacttgacgaaagccgaaagaggtgggttgtcagaattggacaaagctggctttattaagcgccaattggtggagacccggcagattacgaaacacgtagcacaaattttggattcacgaatgaataccaaatacgacgaaaacgacaaattgatacgcgaggtgaaagtgattacgcttaagagtaagttggtttccgatttcaggaaggattttcagttttacaaagtaagagaaataaacaactaccaccacgcccatgatgcttacctcaacgcggtagttggcacagctcttatcaaaaaatatccaaagctggaaagcgagttcgtttacggtgactataaagtatacgacgttcggaagatgatagccaaatcagagcaggaaattgggaaggcaaccgcaaaatacttcttctattcaaacatcatgaacttctttaagacggagattacgctcgcgaacggcgaaatacgcaagaggcccctcatagagactaacggcgaaaccggggagatcgtatgggacaaaggacgggactttgcgaccgttagaaaagtactttcaatgccacaagtgaatattgttaaaaagacagaagtacaaacaggggggttcagtaaggaatccattttgcccaagcggaacagtgataaattgatagcaaggaaaaaagattgggaccctaagaagtacggtggtttcgactctcctaccgttgcatattcagtccttgtagttgcgaaagtggaaaaggggaaaagtaagaagcttaagagtgttaaagagcttctgggcataaccataatggaacggtctagcttcgagaaaaatccaattgactttctcgaggctaaaggttacaaggaggtaaaaaaggacctgataattaaactcccaaagtacagtctcttcgagttggagaatgggaggaagagaatgttggcatctgcaggggagctccaaaaggggaacgagctggctctgccttcaaaatacgtgaactttctgtacctggccagccactacgagaaactcaagggttctcctgaggataacgagcagaaacagctgtttgtagagcagcacaagcattacctggacgagataattgagcaaattagtgagttctcaaaaagagtaatccttgcagacgcgaatctggataaagttctttccgcctataataagcaccgggacaagcctatacgagaacaagccgagaacatcattcacctctttacccttactaatctgggcgcgccggccgccttcaaatacttcgacaccacgatagacaggaaaaggtatacgagtaccaaagaagtacttgacgccactctcatccaccagtctataacagggttgtacgaaacgaggatagatttgtcccagctcggcggcgactcaggagggtcaggcggctccggtggatcaacgaatctttccgacataatcgagaaagaaaccggcaaacagttggtgatccaagaatcaatcctgatgctgcctgaagaagtagaagaggtgattggcaacaaacctgagtctgacattcttgtccacaccgcgtatgacgagagcacggacgagaacgttatgcttctcactagcgacgcccctgagtataaaccatgggcgctggtcatccaagattccaatggggaaaacaagattaagatgcttagtggtgggtctggagggagcggtgggtccacgaacctcagcgacattattgaaaaagagactggtaaacaacttgtaatacaagagtctattctgatgttgcctgaagaggtggaggaggtgattgggaacaaaccggagtctgatatacttgttcataccgcctatgacgaatctactgatgagaatgtgatgcttttaacgtcagacgctcccgagtacaaaccctgggctctggtgattcaggacagcaatggtgagaataagattaaaatgttgagtgggggctcaaagcgcacggctgacggtagcgaatttgagagccccaaaaaaaaacgaaaggtcgaataa

SEQ ID NO: 37 - DNA, 5514 bp, Artificial Sequence
  Description of Artificial Sequence: Synthetic polynucleotide
atgagcagcgagacaggccctgtggctgtggatcctacactgcggagaagaatcgagccccacgagttcgaggtgttcttcgaccccagagagctgcggaaagagacatgcctgctgtacgagatcaactggggcggcagacactctatctggcggcacacaagccagaacaccaacaagcacgtggaagtgaactttatcgagaagtttacgaccgagcggtacttctgccccaacaccagatgcagcatcacctggtttctgagctggtccccttgcggcgagtgcagcagagccatcaccgagtttctgtccagatatccccacgtgaccctgttcatctatatcgcccggctgtaccaccacgccgatcctagaaatagacagggactgcgcgacctgatcagcagcggagtgaccatccagatcatgaccgagcaagagagcggctactgctggcggaacttcgtgaactacagccccagcaacgaagcccactggcctagatatcctcacctgtgggtccgactgtacgtgctggaactgtactgcatcatcctgggcctgcctccatgcctgaacatcctgagaagaaagcagcctcagctgaccttcttcacaatcgccctgcagagctgccactaccagagactgcctccacacatcctgtgggccaccggacttaagagcggaggatctagcggcggctctagcggatctgagacacctggcacaagcgagtctgccacacctgagagtagcggcggatcttctggcggctccgacaagaagtactctatcggactggccatcggcaccaactctgttggatgggccgtgatcaccgacgagtacaaggtgcccagcaagaaattcaaggtgctgggcaacaccgaccggcacagcatcaagaagaatctgatcggcgccctgctgttcgactctggcgaaacagccgaagccaccagactgaagagaaccgccaggcggagatacacccggcggaagaaccggatctgctacctgcaagagatcttcagcaacgagatggccaaggtggacgacagcttcttccacagactggaagagtccttcctggtggaagaggacaagaagcacgagcggcaccccatcttcggcaacatcgtggatgaggtggcctaccacgagaagtaccccaccatctaccacctgagaaagaaactggtggacagcaccgacaaggccgacctgagactgatctacctggctctggcccacatgatcaagttccggggccactttctgatcgagggcgatctgaaccccgacaacagcgacgtggacaagctgttcatccagctggtgcagacctacaaccagctgttcgaggaaaaccccatcaacgcctctggcgtggacgccaaggctatcctgtctgccagactgagcaagagcagaaggctggaaaacctgatcgcccagctgcctggcgagaagaagaatggcctgttcggcaacctgattgccctgagcctgggactgacccctaacttcaagagcaacttcgacctggccgaggatgccaaactgcagctgagcaaggacacctacgacgacgacctggacaatctgctggcccagatcggcgatcagtacgccgacttgtttctggccgccaagaacctgtccgacgccatcctgctgagcgatatcctgagagtgaacaccgagatcacaaaggcccctctgagcgcctctatgatcaagagatacgacgagcaccaccaggatctgaccctgctgaaggccctcgttagacagcagctgccagagaagtacaaagagattttcttcgatcagtccaagaacggctacgccggctacattgatggcggagccagccaagaggaattctacaagttcatcaagcccatcctggaaaagatggacggcaccgaggaactgctggtcaagctgaacagagaggacctgctgcggaagcagcggaccttcgacaatggctctatccctcaccagatccacctgggagagctgcacgccattctgcggagacaagaggacttttacccattcctgaaggacaaccgggaaaagatcgagaagatcctgaccttcaggatcccctactacgtgggaccactggccagaggcaatagcagattcgcctggatgaccagaaagagcgaggaaaccatcacaccctggaacttcgaggaagtggtggacaagggcgccagcgctcagtccttcatcgagcggatgaccaacttcgataagaacctgcctaacgagaaggtgctgcccaagcactccctgctgtatgagtacttcaccgtgtacaacgagctgaccaaagtgaaatacgtgaccgagggaatgagaaagcccgcctttctgagcggcgagcagaaaaaggccattgtggatctgctgttcaagaccaaccggaaagtgaccgtgaagcagctgaaagaggactacttcaagaaaatcgagtgcttcgacagcgtggaaatcagcggcgtggaagatcggttcaatgccagcctgggcacataccacgacctgctgaaaattatcaaggacaaggacttcctggacaacgaagagaacgaggacattctcgaggacatcgtgctgaccctgacactgtttgaggacagagagatgatcgaggaacggctgaaaacatacgcccacctgttcgacgacaaagtgatgaagcaactgaagcggaggcggtacacaggctggggcagactgtctcggaagctgatcaacggcatccgggataagcagtccggcaagacaatcctggatttcctgaagtccgacggcttcgccaacagaaacttcatgcagctgatccacgacgacagcctgacctttaaagaggacatccagaaagcccaggtgtccggccaaggcgattctctgcacgagcacattgccaacctggccggatctcccgccattaagaagggcatcctgcagacagtgaaggtggtggacgagcttgtgaaagtgatgggcagacacaagcccgagaacatcgtgatcgaaatggccagagagaaccagaccacacagaagggccagaagaacagccgcgagagaatgaagcggatcgaagagggcatcaaagagctgggcagccagatcctgaaagaacaccccgtggaaaacacccagctgcagaacgagaagctgtacctgtactacctgcagaatggacgggatatgtacgtggaccaagagctggacatcaaccggctgagcgactacgatgtggaccatatcgtgccccagagctttctgaaggacgactccatcgataacaaggtcctgaccagaagcgacaagaaccggggcaagagcgataacgtgccctccgaagaggtggtcaagaagatgaagaactactggcgacagctgctgaacgccaagctgattacccagcggaagttcgataacctgaccaaggccgagagaggcggcctgagcgaacttgataaggccggcttcattaagcggcagctggtggaaacccggcagatcaccaaacacgtggcacagattctggactcccggatgaacactaagtacgacgagaatgacaagctgatccgggaagtgaaagtcatcaccctgaagtctaagctggtgtccgatttccggaaggatttccagttctacaaagtgcgggaaatcaacaactaccatcacgcccacgacgcctacctgaatgccgttgttggaacagccctgatcaagaagtatcccaagctggaaagcgagttcgtgtacggcgactacaaggtgtacgacgtgcggaagatgatcgccaagagcgaacaagagatcggcaaggctaccgccaagtactttttctacagcaacatcatgaactttttcaagacagagatcaccctggccaacggcgagatccggaaaagacccctgatcgagacaaacggcgaaaccggggagatcgtgtgggataagggcagagattttgccacagtgcggaaagtgctgagcatgccccaagtgaatatcgtgaagaaaaccgaggtgcagacaggcggcttcagcaaagagtctatcctgcctaagcggaacagcgataagctgatcgccagaaagaaggactgggaccctaagaagtacggcggcttcgatagccctaccgtggcctattctgtgctggtggtggccaaagtggaaaagggcaagtccaaaaagctcaagagcgtgaaagagctgctggggatcaccatcatggaaagaagcagctttgagaagaacccgatcgactttctggaagccaagggctacaaagaagtcaagaaggacctcatcatcaagctccccaagtacagcctgttcgagctggaaaatggccggaagcggatgctggcctcagcaggcgaactgcagaaaggcaatgaactggccctgcctagcaaatacgtcaacttcctgtacctggccagccactatgagaagctgaagggcagccccgaggacaatgagcaaaagcagctgtttgtggaacagcacaagcactacctggacgagatcatcgagcagatcagcgagttctccaagagagtgatcctggccgacgctaacctggataaggtgctgtctgcctataacaagcaccgggacaagcctatcagagagcaggccgagaatatcatccacctgtttaccctgaccaacctgggagcccctgccgccttcaagtacttcgacaccaccatcgaccggaagaggtacaccagcaccaaagaggtgctggacgccacactgatccaccagtctatcaccggcctgtacgaaacccggatcgacctgtctcagctcggcggcgattctggtggttctggcggaagtggcggatccaccaatctgagcgacatcatcgaaaaagagacaggcaagcagctcgtgatccaagaatccatcctgatgctgcctgaagaggttgaggaagtgatcggcaacaagcctgagtccgacatcctggtgcacaccgcctacgatgagagcaccgatgagaacgtcatgctgctgacaagcgacgcccctgagtacaagccttgggctctcgtgattcaggacagcaatggggagaacaagatcaagatgctgagcggaggtagcggaggcagtggcggaagcacaaacctgtctgatatcattgaaaaagaaaccgggaagcaactggtcattcaagagtccattctcatgctcccggaagaagtcgaggaagtcattggaaacaaacccgagagcgatattctggtccacacagcctatgacgagtctacagacgaaaacgtgatgctcctgacctctgacgctcccgagtataagccctgggcacttgttatccaggactctaacggggaaaacaaaatcaaaatgttgtccggcggcagcaagcggacagccgatggatctgagttcgagagccccaagaagaaacggaaggtggagtaa

SEQ ID NO: 38 - protein, 1367 aa, Streptococcus pyogenes
MDKKYSIGLDIGTNSVGWAVITDDYKVPSKKFKVLGNTDRHSIKKNLIGALLFGSGETAEATRLKRTARRRYTRRKNRICYLQEIFSNEMAKVDDSFFHRLEESFLVEEDKKHERHPIFGNIVDEVAYHEKYPTIYHLRKKLADSTDKADLRLIYLALAHMIKFRGHFLIEGDLNPDNSDVDKLFIQLVQIYNQLFEENPINASRVDAKAILSARLSKSRRLENLIAQLPGEKRNGLFGNLIALSLGLTPNFKSNFDLAEDAKLQLSKDTYDDDLDNLLAQIGDQYADLFLAAKNLSDAILLSDILRVNSEITKAPLSASMIKRYDEHHQDLTLLKALVRQQLPEKYKEIFFDQSKNGYAGYIDGGASQEEFYKFIKPILEKMDGTEELLVKLNREDLLRKQRTFDNGSIPHQIHLGELHAILRRQEDFYPFLKDNREKIEKILTFRIPYYVGPLARGNSRFAWMTRKSEETITPWNFEEVVDKGASAQSFIERMTNFDKNLPNEKVLPKHSLLYEYFTVYNELTKVKYVTEGMRKPAFLSGEQKKAIVDLLFKTNRKVTVKQLKEDYFKKIECFDSVEISGVEDRFNASLGAYHDLLKIIKDKDFLDNEENEDILEDIVLTLTLFEDRGMIEERLKTYAHLFDDKVMKQLKRRRYTGWGRLSRKLINGIRDKQSGKTILDFLKSDGFANRNFMQLIHDDSLTFKEDIQKAQVSGQGHSLHEQIANLAGSPAIKKGILQTVKIVDELVKVMGHKPENIVIEMARENQTTQKGQKNSRERMKRIEEGIKELGSQILKEHPVENTQLQNEKLYLYYLQNGRDMYVDQELDINRLSDYDVDHIVPQSFIKDDSIDNKVLTRSDKNRGKSDNVPSEEVVKKMKNYWRQLLNAKLITQRKFDNLTKAERGGLSELDKAGFIKRQLVETRQITKHVAQILDSRMNTKYDENDKLIREVKVITLKSKLVSDFRKDFQFYKVREINNYHHAHDAYLNAVVGTALIKKYPKLESEFVYGDYKVYDVRKMIAKSEQEIGKATAKYFFYSNIMNFFKTEITLANGEIRKRPLIETNGETGEIVWDKGRDFATVRKVLSMPQVNIVKKTEVQTGGFSKESILPKRNSDKLIARKKDWDPKKYGGFDSPTVAYSVLVVAKVEKGKSKKLKSVKELLGITIMERSSFEKNPIDFLEAKGYKEVKKDLIIKLPKYSLFELENGRKRMLASAGELQKGNELALPSKYVNFLYLASHYEKLKGSPEDNEQKQLFVEQHKHYLDEIIEQISEFSKRVILADANLDKVLSAYNKHRDKPIREQAENIIHLFTLTNLGAPAAFKYFDTTIDRKRYTSTKEVLDATLIHQSITGLYETRIDLSQLGGD

SEQ ID NO: 39 - DNA, 306 bp, Artificial Sequence
  Description of Artificial Sequence: Synthetic polynucleotide
tgcctgtcatacgaaaccgagatactgacagtagaatatggccttctgccaatcgggaagattgtggagaaacggatagaatgcacagtttactctgtcgataacaatggtaacatttatactcagccagttgcccagtggcacgaccggggagagcaggaagtattcgaatactgtctggaggatggaagtctcattagggccactaaggaccacaaatttatgacagtcgatggccagatgctgcctatagacgaaatctttgagcgagagttggacctcatgcgagttgacaaccttcctaat

SEQ ID NO: 40 - protein, 102 aa, Artificial Sequence
  Description of Artificial Sequence: Synthetic polypeptide
CLSYETEILTVEYGLLPIGKIVEKRIECTVYSVDNNGNIYTQPVAQWHDRGEQEVFEYCLEDGSLIRATKDHKFMTVDGQMLPIDEIFERELDLMRVDNLPN

SEQ ID NO: 41 - DNA, 108 bp, Artificial Sequence
  Description of Artificial Sequence: Synthetic polynucleotide
atgatcaagatagctacaaggaagtatcttggcaaacaaaacgtttatgatattggagtcgaaagagatcacaactttgctctgaagaacggattcatagcttctaat

SEQ ID NO: 42 - protein, 36 aa, Artificial Sequence
  Description of Artificial Sequence: Synthetic polypeptide
MIKIATRKYLGKQNVYDIGVERDHNFALKNGFIASN

SEQ ID NO: 43 - DNA, 303 bp, Artificial Sequence
  Description of Artificial Sequence: Synthetic polynucleotide
tgcctgtcttatgataccgagatacttaccgttgaatatggcttcttgcctattggaaagattgtcgaagagagaattgaatgcacagtatatactgtagacaagaatggtttcgtttacacacagcccattgctcaatggcacaatcgcggcgaacaagaagtatttgagtactgtctcgaggatggaagcatcatacgagcaactaaagatcataaattcatgaccactgacgggcagatgttgccaatagatgagatattcgagcggggcttggatctcaaacaagtggatggattgcca

SEQ ID NO: 44 - protein, 101 aa, Artificial Sequence
  Description of Artificial Sequence: Synthetic polypeptide
CLSYDTEILTVEYGFLPIGKIVEERIECTVYTVDKNGFVYTQPIAQWHNRGEQEVFEYCLEDGSIIRATKDHKFMTTDGQMLPIDEIFERGLDLKQVDGLP

SEQ ID NO: 45 - DNA, 159 bp, Artificial Sequence
  Description of Artificial Sequence: Synthetic polynucleotide
atgaagaggactgccgatggatcagagtttgaatctcccaagaagaagaggaaagtaaagataatatctcgaaaaagtcttggtacccaaaatgtctatgatattggagtggagaaagatcacaacttccttctcaagaacggtctcgtagccagcaac

SEQ ID NO: 46 - protein, 53 aa, Artificial Sequence
  Description of Artificial Sequence: Synthetic polypeptide
MKRTADGSEFESPKKKRKVKIISRKSLGTQNVYDIGVEKDHNFLLKNGLVASN

SEQ ID NO: 47 - protein, 24 aa, Artificial Sequence
  Description of Artificial Sequence: Synthetic peptide
SGGSSGSETPGTSESATPESSGGS

SEQ ID NO: 48 - protein, 32 aa, Artificial Sequence
  Description of Artificial Sequence: Synthetic polypeptide
SGGSSGGSSGSETPGTSESATPESSGGSSGGS

SEQ ID NO: 49 - protein, 104 aa, Artificial Sequence
  Description of Artificial Sequence: Synthetic polypeptide
GGSGGSPGSPAGSPTSTEEGTSESATPESGPGTSTEPSEGSAPGSPAGSPTSTEEGTSTEPSEGSAPGTSTEPSEGSAPGTSESATPESGPGSEPATSGGSGGS

SEQ ID NO: 50 - protein, 16 aa, Artificial Sequence
  Description of Artificial Sequence: Synthetic peptide
SGSETPGTSESATPES

SEQ ID NO: 51 - protein, 24 aa, Artificial Sequence
  Description of Artificial Sequence: Synthetic peptide
SGGSSGGSSGSETPGTSESATPES

SEQ ID NO: 52 - protein, 40 aa, Artificial Sequence
  Description of Artificial Sequence: Synthetic polypeptide
SGGSSGGSSGSETPGTSESATPESSGGSSGGSSGGSSGGS

SEQ ID NO: 53 - protein, 64 aa, Artificial Sequence
  Description of Artificial Sequence: Synthetic polypeptide
SGGSSGGSSGSETPGTSESATPESSGGSSGGSSGGSSGGSSGSETPGTSESATPESSGGSSGGS

SEQ ID NO: 54 - protein, 92 aa, Artificial Sequence
  Description of Artificial Sequence: Synthetic polypeptide
PGSPAGSPTSTEEGTSESATPESGPGTSTEPSEGSAPGSPAGSPTSTEEGTSTEPSEGSAPGTSTEPSEGSAPGTSESATPESGPGSEPATS

SEQ ID NO: 55 - protein, 18 aa, Unknown
  Description of Unknown: nuclear localization sequence
KRTADGSEFESPKKKRKV

SEQ ID NO: 56 - protein, 16 aa, Unknown
  Description of Unknown: nuclear localization sequence
KRPAATKKAGQAKKKK

SEQ ID NO: 57 - protein, 17 aa, Unknown
  Description of Unknown: nuclear localization sequence
KKTELQTTNAENKTKKL

SEQ ID NO: 58 - protein, 19 aa, Unknown
  Description of Unknown: nuclear localization sequence
KRGINDRNFWRGENGRKTR

SEQ ID NO: 59 - protein, 16 aa, Unknown
  Description of Unknown: nuclear localization sequence
RKSGKIAAIVVKRPRK

SEQ ID NO: 60 - protein, 7 aa, Unknown
  Description of Unknown: nuclear localization sequence
PKKKRKV

SEQ ID NO: 61 - protein, 30 aa, Unknown
  Description of Unknown: nuclear localization sequence
MDSLLMNRRKFLYQFKNVRWAKGRRETYLC

SEQ ID NO: 62 - protein, 250 aa, Homo sapiens
MSIFTPTNQIRLTNVAVVRMKRAGKRFEIACYKNKVVGWRSGVEKDLDEVLQTHSVFVNVSKGQVAKKEDLISAFGTDDQTEICKQILTKGEVQVSDKERHTQLEQMFRDIATIVADKCVNPETKRPYTVILIERAMKDIHYSVKTNKSTKQQALEVIKQLKEKMKIERAHMRLRFILPVNEGKKLKEKLKPLIKVIESEDYGQQLEIVCLIDPGCFREIDELIKKETKGKGSLEVLNLKDVEEGDEKFE

SEQ ID NO: 63 - DNA, 1605 bp, Homo sapiens
gtaagtaagcctgccagacacactgtgacggctgcctgaagctagtgagtcgcggcgccgcgcactggtggttgggtcagtgccgcgcgccgatcggtcgttaccgcgaggcgctggtggccttcaggctggacggcgcgggtcagccctggttcgccggcttctgggtctttgaacagccgcgatgtcgatcttcacccccaccaaccagatccgcctaaccaatgtggccgtggtacggatgaagcgtgccgggaagcgcttcgaaatcgcctgctacaaaaacaaggtcgtcggctggcggagcggcgtggaaaaagacctcgatgaagttctgcagacccactcagtgtttgtaaatgtttctaaaggtcaggttgccaaaaaggaagatctcatcagtgcgtttggaacagatgaccaaactgaaatctgtaagcagattttgactaaaggagaagttcaagtatcagataaagaaagacacacacaactggagcagatgtttagggacattgcaactattgtggcagacaaatgtgtgaatcctgaaacaaagagaccatacaccgtgatccttattgagagagccatgaaggacatccactattcggtgaaaaccaacaagagtacaaaacagcaggctttggaagtgataaagcagttaaaagagaaaatgaagatagaacgtgctcacatgaggcttcggttcatccttccagtcaatgaaggcaagaagctgaaagaaaagctcaagccactgatcaaggtcatagaaagtgaagattatggccaacagttagaaatcgtatgtctgattgacccgggctgcttccgagaaattgatgagctaataaaaaaggaaactaaaggcaaaggttctttggaagtactcaatctgaaagatgtagaagaaggagatgagaaatttgaatgacacccatcaatctcttcacctctaaaacactaaagtgtttccgtttccgacggcactgtttcatgtctgtggtctgccaaatacttgcttaaactatttgacattttctatctttgtgttaacagtggacacagcaaggctttcctacataagtataataatgtgggaatgatttggttttaattataaactggggtctaaatcctaaagcaaaattgaaactccaagatgcaaagtccagagtggcattttgctactctgtctcatgccttgatagctttccaaaatgaaagttacttgaggcagctcttgtgggtgaaaagttatttgtacagtagagtaagattattaggggtatgtctatacaacaaaagggggggtctttcctaaaaaagaaaacatatgatgcttcatttctacttaatggaacttgtgttctgagggtcattatggtatcgtaatgtaaagcttggatgatgttcctgattatctgagaaacagatatagaaaaattgtgccggacttacctttcattgaacatgctgccataacttagattattcttggttaaaaaataaaagtcacttatttctaattcttaaagtttataatatatattaatatagctaaaattgtatgtaatcaataaaaccactcttatgtttatt

SEQ ID NO: 64 - DNA, 870 bp, Homo sapiens
cctttttgggcgtggaaagatggcggtaaaagccacaatgcgcaggcgtcatcgctcacttctcccctcccggcttctgctccacctgacgcctgcgcagtaagtaagcctgccagacacgctgtggcggctgcctgaagctagtgagtcgcggcgccgcgcacttgtggttgggtcagtgccgcgcgccgctcggtcgttaccgcgaggcgctggtggccttcaggctggacggcgcgggtcagccctggtttgccggcttctgggtctttgaacagccgcgatgtcgatcttcacccccaccaaccagatccgcctaaccaatgtggccgtggtacggatgaagcgcgccaggaagcgcttcgaaatcgcctgctacagaaacaaggtcgtcggctggcggagcggcttattttgactaaaggagaagttcaagtatcagataaagacacacacaactggagcagatgtttagggacattgcaattattgtggcagacaaatgtgtgactcctgaaacaaagagaccatacaccgtgatccttattgagagagccatgaaggacatccactatttggtgaaaaccaacaggagtacaaaacagcaggctttggaagtgataaagcagttaaaagagaaaatgaagatagaacgtgctcacatgaggcttcagttcatccttccagtgaatgaaggcaagaagctgaaagaaaagctcaagccactgatcaaggtcatagaaagtaaagattatggccaacagttagaaatcgtaagagtcaaatattttctttgcttcatgttacctaaatattgtattctctagtaataaatttgtagcaaacattcaaaaaaaaaaaaaaaaaaaa

SEQ ID NO: 65 - DNA, 1734 bp, Homo sapiens
cctttttgggcgtggaaagatggcggtaaaagccacaatgcgcaggcgtcatcgctcacttctcccctcccggcttctgctccacctgacgcctgcgcagtaagtaagcctgccagacacgctgtggcggctgcctgaagctagtgagtcgcggcgccgcgcacttgtggttgggtcagtgccgcgcgccgctcggtcgttaccgcgaggcgctggtggccttcaggctggacggcgcgggtcagccctggtttgccggcttctgggtctttgaacagccgcgatgtcgatcttcacccccaccaaccagatccgcctaaccaatgtggccgtggtacggatgaagcgcgccaggaagcgcttcgaaatcgcctgctacagaaacaaggtcgtcggctggcggagcggcttggaaaaagaccttgatgaagttctgcagacccactcagtgtttgtaaatgtttcctaaggtcaggttgccaagaaggaagatctcatcagtgcgtttggaacagatgaccaaactgaaatctattttgactaaaggagaagttcaagtatcagataaagacacacacaactggagcagatgtttagggacattgcaattattgtggcagacaaatgtgtgactcctgaaacaaagagaccatacaccgtgatccttattgagagagccatgaaggacatccactatttggtgaaaaccaacaggagtacaaaacagcaggctttggaagtgataaagcagttaaaagagaaaatgaagatagaacgtgctcacatgaggcttcagttcatccttccagtgaatgaaggcaagaagctgaaagaaaagctcaagccactgatcaaggtcatagaaagtaaagattatggccaacagttagaaatcgtatgtctgattgacctgggctgcttccgagaaattgatgagctaataaaaaaggaaaccaaaggcaaaggttctttggaagtactcaatctgaaagatttgaagaaggagatgagaaatttgaatgacacccatcagtctcttcacctctaaaacactaaagtgttttcgtttccaacagcactgtttcatgtctgtggtctgccaaatacttgctcaaactatttgacattttctatctttgtgttaacagtggacacagcaaggctttcctacataagtataataatgtgggaatgatttggttttaattataaactggggtctaaatcctaaagcaaaattgaaactccaggatgcaaaatccagagtggcattttgctactctgtctcatgccttgatagctttccaaaatgaaagttacttgaggcagctcttgtgggtgaaaagttttttgtacagtagagtaagattattaggggtatgtctatacgacaaaaggggggtctttcctaaaaaagaaaacatgatgcttcatttctacttaatggaacttgtgttctgagggtcattatggtatcgtaatataaagcttggatgatgttcctgattatctgagaaacagatatagaaaaattgtgtcggacttaaataattttcgttgaacatgctgccataacttagattattcttggttaaaaaataaaagtcacttatttctaattcttaaagtttataatatatattaatatagctaaaattgtatgtaatcaataaaaccactcttatgtttattaaactatggcttgtgtttctagacaaaaaaaaaaaaaaaaaa

SEQ ID NO: 66 - DNA, 1612 bp, Homo sapiens
cctttttgggcgtggaaagatggcggtaaaagccacaatgcgcaggcgtcatcgctcacttctcccctcccggcttctgctccacctgacgcctgcgcagtaagtaagcctgccagacacgctgtggcggctgcctgaagctagtgagtcgcggcgccgcgcacttgtggttgggtcagtgccgcgcgccgctcggtcgttaccgcgaggcgctggtggccttcaggctggacggcgcgggtcagccctggtttgccggcttctgggtctttgaacagccgcgatgtcgatcttcacccccaccaaccagatccgcctaaccaatgtggccgtggtacggatgaagcgcgccaggaagcgcttcgaaatcgcctgctacagaaacaaggtcgtcggctggcggagcggcttattttgactaaaggagaagttcaagtatcagataaagacacacacaactggagcagatgtttagggacattgcaattattgtggcagacaaatgtgtgactcctgaaacaaagagaccatacaccgtgatccttattgagagagccatgaaggacatccactatttggtgaaaaccaacaggagtacaaaacagcaggctttggaagtgataaagcagttaaaagagaaaatgaagatagaacgtgctcacatgaggcttcagttcatccttccagtgaatgaaggcaagaagctgaaagaaaagctcaagccactgatcaaggtcatagaaagtaaagattatggccaacagttagaaatcgtatgtctgattgacctgggctgcttccgagaaattgatgagctaataaaaaaggaaaccaaaggcaaaggttctttggaagtactcaatctgaaagatttgaagaaggagatgagaaatttgaatgacacccatcagtctcttcacctctaaaacactaaagtgttttcgtttccaacagcactgtttcatgtctgtggtctgccaaatacttgctcaaactatttgacattttctatctttgtgttaacagtggacacagcaaggctttcctacataagtataataatgtgggaatgatttggttttaattataaactggggtctaaatcctaaagcaaaattgaaactccaggatgcaaaatccagagtggcattttgctactctgtctcatgccttgatagctttccaaaatgaaagttacttgaggcagctcttgtgggtgaaaagttttttgtacagtagagtaagattattaggggtatgtctatacgacaaaaggggggtctttcctaaaaaagaaaacatgatgcttcatttctacttaatggaacttgtgttctgagggtcattatggtatcgtaatataaagcttggatgatgttcctgattatctgagaaacagatatagaaaaattgtgtcggacttaaataattttcgttgaacatgctgccataacttagattattcttggttaaaaaataaaagtcacttatttctaattcttaaagtttataatatatattaatatagctaaaattgtatgtaatcaataaaaccactcttatgtttattaaactatggcttgtgtttctagacaaaaaaaaaaaaaaaaaa

SEQ ID NO: 67 - DNA, 992 bp, Homo sapiens
cctttttgggcgtggaaagatggcggtaaaagccacaatgcgcaggcgtcatcgctcacttctcccctcccggcttctgctccacctgacgcctgcgcagtaagtaagcctgccagacacgctgtggcggctgcctgaagctagtgagtcgcggcgccgcgcacttgtggttgggtcagtgccgcgcgccgctcggtcgttaccgcgaggcgctggtggccttcaggctggacggcgcgggtcagccctggtttgccggcttctgggtctttgaacagccgcgatgtcgatcttcacccccaccaaccagatccgcctaaccaatgtggccgtggtacggatgaagcgcgccaggaagcgcttcgaaatcgcctgctacagaaacaaggtcgtcggctggcggagcggcttggaaaaagaccttgatgaagttctgcagacccactcagtgtttgtaaatgtttcctaaggtcaggttgccaagaaggaagatctcatcagtgcgtttggaacagatgaccaaactgaaatctattttgactaaaggagaagttcaagtatcagataaagacacacacaactggagcagatgtttagggacattgcaattattgtggcagacaaatgtgtgactcctgaaacaaagagaccatacaccgtgatccttattgagagagccatgaaggacatccactatttggtgaaaaccaacaggagtacaaaacagcaggctttggaagtgataaagcagttaaaagagaaaatgaagatagaacgtgctcacatgaggcttcagttcatccttccagtgaatgaaggcaagaagctgaaagaaaagctcaagccactgatcaaggtcatagaaagtaaagattatggccaacagttagaaatcgtaagagtcaaatattttctttgcttcatgttacctaaatattgtattctctagtaataaatttgtagcaaacattcaaaaaaaaaaaaaaaaaaaa

SEQ ID NO: 68 - protein, 84 aa, Bacillus phage PBS2
MTNLSDIIEKETGKQLVIQESILMLPEEVEEVIGNKPESDILVHTAYDESTDENVMLLTSDAPEYKPWALVIQDSNGENKIKML

SEQ ID NO: 69 - protein, 1368 aa, Streptococcus pyogenes [sequence omitted]

SEQ ID NO: 70 - RNA, 80 nt, Artificial Sequence
  Description of Artificial Sequence: Synthetic oligonucleotide
guuuuagagcuagaaauagcaaguuaaaauaaggcuaguccguuaucaacuugaaaaaguggcaccgagucggugcuuuu

SEQ ID NO: 71 - RNA, 125 nt, Artificial Sequence
  Description of Artificial Sequence: Synthetic polynucleotide
guuuuuguacucucaagauuuaaguaacuguacaacgaaacuuacacaguuacuuaaaucuugcagaagcuacaaagauaaggcuucaugccgaaaucaacacccugucauuuuauggcagggug

SEQ ID NO: 72 - RNA, 76 nt, Artificial Sequence
  Description of Artificial Sequence: Synthetic oligonucleotide
guuuuagagcuagaaauagcaaguuaaaauaaggcuaguccguuaucaacuugaaaaaguggcaccgagucggugc

SEQ ID NO: 73 - RNA, 84 nt, Artificial Sequence
  Description of Artificial Sequence: Synthetic oligonucleotide
guuuuaguacucuguaaugaaaauuacagaaucuacuaaaacaaggcaaaaugccguguuuaucucgucaacuuguuggcgaga

SEQ ID NO: 74 - DNA, 97 bp, Artificial Sequence
  Description of Artificial Sequence: Synthetic oligonucleotide
  Description of Combined DNA/RNA Molecule: Synthetic oligonucleotide
guucugtcuuuuggucaggacaaccgucuagcuauaagugcugcagggugugagaaacuccuauugcuggacgaugucucuuacgaggcauuagcac

SEQ ID NO: 75 - RNA, 88 nt, Artificial Sequence
  Description of Artificial Sequence: Synthetic oligonucleotide
gaccuauagggucaaugaaucugugcgugugccauaaguaauuaaaaauuacccaccacaggagcaccugaaaacaggugcuuggcac

SEQ ID NO: 76 - DNA, 4104 bp, Streptococcus pyogenes
atggataagaaatactcaataggcttagatatcggcacaaatagcgtcggatgggcggtgatcactgatgattataaggttccgtctaaaaagttcaaggttctgggaaatacagaccgccacagtatcaaaaaaaatcttataggggctcttttatttggcagtggagagacagcggaagcgactcgtctcaaacggacagctcgtagaaggtatacacgtcggaagaatcgtatttgttatctacaggagattttttcaaatgagatggcgaaagtagatgatagtttctttcatcgacttgaagagtcttttttggtggaagaagacaagaagcatgaacgtcatcctatttttggaaatatagtagatgaagttgcttatcatgagaaatatccaactatctatcatctgcgaaaaaaattggcagattctactgataaagcggatttgcgcttaatctatttggccttagcgcatatgattaagtttcgtggtcattttttgattgagggagatttaaatcctgataatagtgatgtggacaaactatttatccagttggtacaaatctacaatcaattatttgaagaaaaccctattaacgcaagtagagtagatgctaaagcgattctttctgcacgattgagtaaatcaagacgattagaaaatctcattgctcagctccccggtgagaagagaaatggcttgtttgggaatctcattgctttgtcattgggattgacccctaattttaaatcaaattttgatttggcagaagatgctaaattacagctttcaaaagatacttacgatgatgatttagataatttattggcgcaaattggagatcaatatgctgatttgtttttggcagctaagaatttatcagatgctattttactttcagatatcctaagagtaaatagtgaaataactaaggctcccctatcagcttcaatgattaagcgctacgatgaacatcatcaagacttgactcttttaaaagctttagttcgacaacaacttccagaaaagtataaagaaatcttttttgatcaatcaaaaaacggatatgcaggttatattgatgggggagctagccaagaagaattttataaatttatcaaaccaattttagaaaaaatggatggtactgaggaattattggtgaaactaaatcgtgaagatttgctgcgcaagcaacggacctttgacaacggctctattccccatcaaattcacttgggtgagctgcatgctattttgagaagacaagaagacttttatccatttttaaaagacaatcgtgagaagattgaaaaaatcttgacttttcgaattccttattatgttggtccattggcgcgtggcaatagtcgttttgcatggatgactcggaagtctgaagaaacaattaccccatggaattttgaagaagttgtcgataaaggtgcttcagctcaatcatttattgaacgcatgacaaactttgataaaaatcttccaaatgaaaaagtactaccaaaacatagtttgctttatgagtattttacggtttataacgaattgacaaaggtcaaatatgttactgagggaatgcgaaaaccagcatttctttcaggtgaacagaagaaagccattgttgatttactcttcaaaacaaatcgaaaagtaaccgttaagcaattaaaagaagattatttcaaaaaaatagaatgttttgatagtgttgaaatttcaggagttgaagatagatttaatgcttcattaggcgcctaccatgatttgctaaaaattattaaagataaagattttttggataatgaagaaaatgaagatatcttagaggatattgttttaacattgaccttatttgaagatagggggatgattgaggaaagacttaaaacatatgctcacctctttgatgataaggtgatgaaacagcttaaacgtcgccgttatactggttggggacgtttgtctcgaaaattgattaatggtattagggataagcaatctggcaaaacaatattagattttttgaaatcagatggttttgccaatcgcaattttatgcagctgatccatgatgatagtttgacatttaaagaagatattcaaaaagcacaggtgtctggacaaggccatagtttacatgaacagattgctaacttagctggcagtcctgctattaaaaaaggtattttacagactgtaaaaattgttgatgaactggtcaaagtaatggggcataagccagaaaatatcgttattgaaatggcacgtgaaaatcagacaactcaaaagggccagaaaaattcgcgagagcgtatgaaacgaatcgaagaaggtatcaaagaattaggaagtcagattcttaaagagcatcctgttgaaaatactcaattgcaaaatgaaaagctctatctctattatctacaaaatggaagagacatgtatgtggaccaagaattagatattaatcgtttaagtgattatgatgtcgatcacattgttccacaaagtttcattaaagacgattcaatagacaataaggtactaacgcgttctgataaaaatcgtggtaaatcggataacgttccaagtgaagaagtagtcaaaaagatgaaaaactattggagacaacttctaaacgccaagttaatcactcaacgtaagtttgataatttaacgaaagctgaacgtggaggtttgagtgaacttgataaagctggttttatcaaacgccaattggttgaaactcgccaaatcactaagcatgtggcacaaattttggatagtcgcatgaatactaaatacgatgaaaatgataaacttattcgagaggttaaagtgattaccttaaaatctaaattagtttctgacttccgaaaagatttccaattctataaagtacgtgagattaacaattaccatcatgcccatgatgcgtatctaaatgccgtcgttggaactgctttgattaagaaatatccaaaacttgaatcggagtttgtctatggtgattataaagtttatgatgttcgtaaaatgattgctaagtctgagcaagaaataggcaaagcaaccgcaaaatatttcttttactctaatatcatgaacttcttcaaaacagaaattacacttgcaaatggagagattcgcaaacgccctctaatcgaaactaatggggaaactggagaaattgtctgggataaagggcgagattttgccacagtgcgcaaagtattgtccatgccccaagtcaatattgtcaagaaaacagaagtacagacaggcggattctccaaggagtcaattttaccaaaaagaaattcggacaagcttattgctcgtaaaaaagactgggatccaaaaaaatatggtggttttgatagtccaacggtagcttattcagtcctagtggttgctaaggtggaaaaagggaaatcgaagaagttaaaatccgttaaagagttactagggatcacaattatggaaagaagttcctttgaaaaaaatccgattgactttttagaagctaaaggatataaggaagttaaaaaagacttaatcattaaactacctaaatatagtctttttgagttagaaaacggtcgtaaacggatgctggctagtgccggagaattacaaaaaggaaatgagctggctctgccaagcaaatatgtgaattttttatatttagctagtcattatgaaaagttgaagggtagtccagaagataacgaacaaaaacaattgtttgtggagcagcataagcattatttagatgagattattgagcaaatcagtgaattttctaagcgtgttattttagcagatgccaatttagataaagttcttagtgcatataacaaacatagagacaaaccaatacgtgaacaagcagaaaatattattcatttatttacgttgacgaatcttggagctcccgctgcttttaaatattttgatacaacaattgatcgtaaacgatatacgtctacaaaagaagttttagatgccactcttatccatcaatccatcactggtctttatgaaacacgcattgatttgagtcagctaggaggtgactga

SEQ ID NO: 77 - DNA, 4212 bp, Streptococcus pyogenes
atggataaaaagtattctattggtttagacatcggcactaattccgttggatgggctgtcataaccgatgaatacaaagtaccttcaaagaaatttaaggtgttggggaacacagaccgtcattcgattaaaaagaatcttatcggtgccctcctattcgatagtggcgaaacggcagaggcgactcgcctgaaacgaaccgctcggagaaggtatacacgtcgcaagaaccgaatatgttacttacaagaaatttttagcaatgagatggccaaagttgacgattctttctttcaccgtttggaagagtccttccttgtcgaagaggacaagaaacatgaacggcaccccatctttggaaacatagtagatgaggtggcatatcatgaaaagtacccaacgatttatcacctcagaaaaaagctagttgactcaactgataaagcggacctgaggttaatctacttggctcttgcccatatgataaagttccgtgggcactttctcattgagggtgatctaaatccggacaactcggatgtcgacaaactgttcatccagttagtacaaacctataatcagttgtttgaagagaaccctataaatgcaagtggcgtggatgcgaaggctattcttagcgcccgcctctctaaatcccgacggctagaaaacctgatcgcacaattacccggagagaagaaaaatgggttgttcggtaaccttatagcgctctcactaggcctgacaccaaattttaagtcgaacttcgacttagctgaagatgccaaattgcagcttagtaaggacacgtacgatgacgatctcgacaatctactggcacaaattggagatcagtatgcggacttatttttggctgccaaaaaccttagcgatgcaatcctcctatctgacatactgagagttaatactgagattaccaaggcgccgttatccgcttcaatgatcaaaaggtacgatgaacatcaccaagacttgacacttctcaaggccctagtccgtcagcaactgcctgagaaatataaggaaatattctttgatcagtcgaaaaacgggtacgcaggttatattgacggcggagcgagtcaagaggaattctacaagtttatcaaacccatattagagaagatggatgggacggaagagttgcttgtaaaactcaatcgcgaagatctactgcgaaagcagcggactttcgacaacggtagcattccacatcaaatccacttaggcgaattgcatgctatacttagaaggcaggaggatttttatccgttcctcaaagacaatcgtgaaaagattgagaaaatcctaacctttcgcataccttactatgtgggacccctggcccgagggaactctcggttcgcatggatgacaagaaagtccgaagaaacgattactccatggaattttgaggaagttgtcgataaaggtgcgtcagctcaatcgttcatcgagaggatgaccaactttgacaagaatttaccgaacgaaaaagtattgcctaagcacagtttactttacgagtatttcacagtgtacaatgaactcacgaaagttaagtatgtcactgagggcatgcgtaaacccgcctttctaagcggagaacagaagaaagcaatagtagatctgttattcaagaccaaccgcaaagtgacagttaagcaattgaaagaggactactttaagaaaattgaatgcttcgattctgtcgagatctccggggtagaagatcgatttaatgcgtcacttggtacgtatcatgacctcctaaagataattaaagataaggacttcctggataacgaagagaatgaagatatcttagaagatatagtgttgactcttaccctctttgaagatcgggaaatgattgaggaaagactaaaaacatacgctcacctgttcgacgataaggttatgaaacagttaaagaggcgtcgctatacgggctggggacgattgtcgcggaaacttatcaacgggataagagacaagcaaagtggtaaaactattctcgattttctaaagagcgacggcttcgccaataggaactttatgcagctgatccatgatgactctttaaccttcaaagaggatatacaaaaggcacaggtttccggacaaggggactcattgcacgaacatattgcgaatcttgctggttcgccagccatcaaaaagggcatactccagacagtcaaagtagtggatgagctagttaaggtcatgggacgtcacaaaccggaaaacattgtaatcgagatggcacgcgaaaatcaaacgactcagaaggggcaaaaaaacagtcgagagcggatgaagagaatagaagagggtattaaagaactgggcagccagatcttaaaggagcatcctgtggaaaatacccaattgcagaacgagaaactttacctctattacctacaaaatggaagggacatgtatgttgatcaggaactggacataaaccgtttatctgattacgacgtcgatcacattgtaccccaatcctttttgaaggacgattcaatcgacaataaagtgcttacacgctcggataagaaccgagggaaaagtgacaatgttccaagcgaggaagtcgtaaagaaaatgaagaactattggcggcagctcctaaatgcgaaactgataacgcaaagaaagttcgataacttaactaaagctgagaggggtggcttgtctgaacttgacaaggccggatttattaaacgtcagctcgtggaaacccgccaaatcacaaagcatgttgcacagatactagattcccgaatgaatacgaaatacgacgagaacgataagctgattcgggaagtcaaagtaatcactttaaagtcaaaattggtgtcggacttcagaaaggattttcaattctataaagttagggagataaataactaccaccatgcgcacgacgcttatcttaatgccgtcgtagggaccgcactcattaagaaatacccgaagctagaaagtgagtttgtgtatggtgattacaaagtttatgacgtccgtaagatgatcgcgaaaagcgaacaggagataggcaaggctacagccaaatacttcttttattctaacattatgaatttctttaagacggaaatcactctggcaaacggagagatacgcaaacgacctttaattgaaaccaatggggagacaggtgaaatcgtatgggataagggccgggacttcgcgacggtgagaaaagttttgtccatgccccaagtcaacatagtaaagaaaactgaggtgcagaccggagggttttcaaaggaatcgattcttccaaaaaggaatagtgataagctcatcgctcgtaaaaaggactgggacccgaaaaagtacggtggcttcgatagccctacagttgcctattctgtcctagtagtggcaaaagttgagaagggaaaatccaagaaactgaagtcagtcaaagaattattggggataacgattatggagcgctcgtcttttgaaaagaaccccatcgacttccttgaggcgaaaggttacaaggaagtaaaaaaggatctcataattaaactaccaaagtatagtctgtttgagttagaaaatggccgaaaacggatgttggctagcgccggagagcttcaaaaggggaacgaactcgcactaccgtctaaatacgtgaatttcctgtatttagcgtcccattacgagaagttgaaaggttcacctgaagataacgaacagaagcaactttttgttgagcagcacaaacattatctcgacgaaatcatagagcaaatttcggaattcagtaagagagtcatcctagctgatgccaatctggacaaagtattaagcgcatacaacaagcacagggataaacccatacgtgagcaggcggaaaatattatccatttgtttactcttaccaacctcggcgctccagccgcattcaagtattttgacacaacgatagatcgcaaacgatacacttctaccaaggaggtgctagacgcgacactgattcaccaatccatcacgggattatatgaaactcggatagatttgtcacagcttgggggtgacggatcccccaagaagaagaggaaagtctcgagcgactacaaagaccatgacggtgattataaagatcatgacatcgattacaaggatgacgatgacaaggctgcagga

SEQ ID NO: 78 - protein, 1368 aa, Streptococcus pyogenes
MDKKYSIGLAIGTNSVGWAVITDEYKVPSKKFKVLGNTDRHSIKKNLIGALLFDSGETAEATRLKRTARRRYTRRKNRICYLQEIFSNEMAKVDDSFFHRLEESFLVEEDKKHERHPIFGNIVDEVAYHEKYPTIYHLRKKLVDSTDKADLRLIYLALAHMIKFRGHFLIEGDLNPDNSDVDKLFIQLVQTYNQLFEENPINASGVDAKAILSARLSKSRRLENLIAQLPGEKKNGLFGNLIALSLGLTPNFKSNFDLAEDAKLQLSKDTYDDDLDNLLAQIGDQYADLFLAAKNLSDAILLSDILRVNTEITKAPLSASMIKRYDEHHQDLTLLKALVRQQLPEKYKEIFFDQSKNGYAGYIDGGASQEEFYKFIKPILEKMDGTEELLVKLNREDLLRKQRTFDNGSIPHQIHLGELHAILRRQEDFYPFLKDNREKIEKILTFRIPYYVGPLARGNSRFAWMTRKSEETITPWNFEEVVDKGASAQSFIERMTNFDKNLPNEKVLPKHSLLYEYFTVYNELTKVKYVTEGMRKPAFLSGEQKKAIVDLLFKTNRKVTVKQLKEDYFKKIECFDSVEISGVEDRFNASLGTYHDLLKIIKDKDFLDNEENEDILEDIVLTLTLFEDREMIEERLKTYAHLFDDKVMKQLKRRRYTGWGRLSRKLINGIRDKQSGKTILDFLKSDGFANRNFMQLIHDDSLTFKEDIQKAQVSGQGDSLHEHIANLAGSPAIKKGILQTVKVVDELVKVMGRHKPENIVIEMARENQTTQKGQKNSRERMKRIEEGIKELGSQILKEHPVENTQLQNEKLYLYYLQNGRDMYVDQELDINRLSDYDVDHIVPQSFLKDDSIDNKVLTRSDKNRGKSDNVPSEEVVKKMKNYWRQLLNAKLITQRKFDNLTKAERGGLSELDKAGFIKRQLVETRQITKHVAQILDSRMNTKYDENDKLIREVKVITLKSKLVSDFRKDFQFYKVREINNYHHAHDAYLNAVVGTALIKKYPKLESEFVYGDYKVYDVRKMIAKSEQEIGKATAKYFFYSNIMNFFKTEITLANGEIRKRPLIETNGETGEIVWDKGRDFATVRKVLSMPQVNIVKKTEVQTGGFSKESILPKRNSDKLIARKKDWDPKKYGGFDSPTVAYSVLVVAKVEKGKSKKLKSVKELLGITIMERSSFEKNPIDFLEAKGYKEVKKDLIIKLPKYSLFELENGRKRMLASAGELQKGNELALPSKYVNFLYLASHYEKLKGSPEDNEQKQLFVEQHKHYLDEIIEQISEFSKRVILADANLDKVLSAYNKHRDKPIREQAENIIHLFTLTNLGAPAAFKYFDTTIDRKRYTSTKEVLDATLIHQSITGLYETRIDLSQLGGD

SEQ ID NO: 79 - DNA, 4107 bp, Streptococcus pyogenes
atggataagaaatactcaataggcttagatatcggcacaaatagcgtcggatgggcggtgatcactgatgaatataaggttccgtctaaaaagttcaaggttctgggaaatacagaccgccacagtatcaaaaaaaatcttataggggctcttttatttgacagtggagagacagcggaagcgactcgtctcaaacggacagctcgtagaaggtatacacgtcggaagaatcgtatttgttatctacaggagattttttcaaatgagatggcgaaagtagatgatagtttctttcatcgacttgaagagtcttttttggtggaagaagacaagaagcatgaacgtcatcctatttttggaaatatagtagatgaagttgcttatcatgagaaatatccaactatctatcatctgcgaaaaaaattggtagattctactgataaagcggatttgcgcttaatctatttggccttagcgcatatgattaagtttcgtggtcattttttgattgagggagatttaaatcctgataatagtgatgtggacaaactatttatccagttggtacaaacctacaatcaattatttgaagaaaaccctattaacgcaagtggagtagatgctaaagcgattctttctgcacgattgagtaaatcaagacgattagaaaatctcattgctcagctccccggtgagaagaaaaatggcttatttgggaatctcattgctttgtcattgggtttgacccctaattttaaatcaaattttgatttggcagaagatgctaaattacagctttcaaaagatacttacgatgatgatttagataatttattggcgcaaattggagatcaatatgctgatttgtttttggcagctaagaatttatcagatgctattttactttcagatatcctaagagtaaatactgaaataactaaggctcccctatcagcttcaatgattaaacgctacgatgaacatcatcaagacttgactcttttaaaagctttagttcgacaacaacttccagaaaagtataaagaaatcttttttgatcaatcaaaaaacggatatgcaggttatattgatgggggagctagccaagaagaattttataaatttatcaaaccaattttagaaaaaatggatggtactgaggaattattggtgaaactaaatcgtgaagatttgctgcgcaagcaacggacctttgacaacggctctattccccatcaaattcacttgggtgagctgcatgctattttgagaagacaagaagacttttatccatttttaaaagacaatcgtgagaagattgaaaaaatcttgacttttcgaattccttattatgttggtccattggcgcgtggcaatagtcgttttgcatggatgactcggaagtctgaagaaacaattaccccatggaattttgaagaagttgtcgataaaggtgcttcagctcaatcatttattgaacgcatgacaaactttgataaaaatcttccaaatgaaaaagtactaccaaaacatagtttgctttatgagtattttacggtttataacgaattgacaaaggtcaaatatgttactgaaggaatgcgaaaaccagcatttctttcaggtgaacagaagaaagccattgttgatttactcttcaaaacaaatcgaaaagtaaccgttaagcaattaaaagaagattatttcaaaaaaatagaatgttttgatagtgttgaaatttcaggagttgaagatagatttaatgcttcattaggtacctaccatgatttgctaaaaattattaaagataaagattttttggataatgaagaaaatgaagatatcttagaggatattgttttaacattgaccttatttgaagatagggagatgattgaggaaagacttaaaacatatgctcacctctttgatgataaggtgatgaaacagcttaaacgtcgccgttatactggttggggacgtttgtctcgaaaattgattaatggtattagggataagcaatctggcaaaacaatattagattttttgaaatcagatggttttgccaatcgcaattttatgcagctgatccatgatgatagtttgacatttaaagaagacattcaaaaagcacaagtgtctggacaaggcgatagtttacatgaacatattgcaaatttagctggtagccctgctattaaaaaaggtattttacagactgtaaaagttgttgatgaattggtcaaagtaatggggcggcataagccagaaaatatcgttattgaaatggcacgtgaaaatcagacaactcaaaagggccagaaaaattcgcgagagcgtatgaaacgaatcgaagaaggtatcaaagaattaggaagtcagattcttaaagagcatcctgttgaaaatactcaattgcaaaatgaaaagctctatctctattatctccaaaatggaagagacatgtatgtggaccaagaattagatattaatcgtttaagtgattatgatgtcgatcacattgttccacaaagtttccttaaagacgattcaatagacaataaggtcttaacgcgttctgataaaaatcgtggtaaatcggataacgttccaagtgaagaagtagtcaaaaagatgaaaaactattggagacaacttctaaacgccaagttaatcactcaacgtaagtttgataatttaacgaaagctgaacgtggaggtttgagtgaacttgataaagctggttttatcaaacgccaattggttgaaactcgccaaatcactaagcatgtggcacaaattttggatagtcgcatgaatactaaatacgatgaaaatgataaacttattcgagaggttaaagtgattaccttaaaatctaaattagtttctgacttccgaaaagatttccaattctataaagtacgtgagattaacaattaccatcatgcccatgatgcgtatctaaatgccgtcgttggaactgctttgattaagaaatatccaaaacttgaatcggagtttgtctatggtgattataaagtttatgatgttcgtaaaatgattgctaagtctgagcaagaaataggcaaagcaaccgcaaaatatttcttttactctaatatcatgaacttcttcaaaacagaaattacacttgcaaatggagagattcgcaaacgccctctaatcgaaactaatggggaaactggagaaattgtctgggataaagggcgagattttgccacagtgcgcaaagtattgtccatgccccaagtcaatattgtcaagaaaacagaagtacagacaggcggattctccaaggagtcaattttaccaaaaagaaattcggacaagcttattgctcgtaaaaaagactgggatccaaaaaaatatggtggttttgatagtccaacggtagcttattcagtcctagtggttgctaaggtggaaaaagggaaatcgaagaagttaaaatccgttaaagagttactagggatcacaattatggaaagaagttcctttgaaaaaaatccgattgactttttagaagctaaaggatataaggaagttaaaaaagacttaatcattaaactacctaaatatagtctttttgagttagaaaacggtcgtaaacggatgctggctagtgccggagaattacaaaaaggaaatgagctggctctgccaagcaaatatgtgaattttttatatttagctagtcattatgaaaagttgaagggtagtccagaagataacgaacaaaaacaattgtttgtggagcagcataagcattatttagatgagattattgagcaaatcagtgaattttctaagcgtgttattttagcagatgccaatttagataaagttcttagtgcatataacaaacatagagacaaaccaatacgtgaacaagcagaaaatattattcatttatttacgttgacgaatcttggagctcccgctgcttttaaatattttgatacaacaattgatcgtaaacgatatacgtctacaaaagaagttttagatgccactcttatccatcaatccatcactggtctttatgaaacacgcattgatttgagtcagctaggaggtgactga

SEQ ID NO: 80 - protein, 1368 aa, Artificial Sequence
  Description of Artificial Sequence: Synthetic polypeptide
MDKKYSIGLAIGTNSVGWAVITDEYKVPSKKFKVLGNTDRHSIKKNLIGALLFDSGETAEATRLKRTARRRYTRRKNRICYLQEIFSNEMAKVDDSFFHRLEESFLVEEDKKHERHPIFGNIVDEVAYHEKYPTIYHLRKKLVDSTDKADLRLIYLALAHMIKFRGHFLIEGDLNPDNSDVDKLFIQLVQTYNQLFEENPINASGVDAKAILSARLSKSRRLENLIAQLPGEKKNGLFGNLIALSLGLTPNFKSNFDLAEDAKLQLSKDTYDDDLDNLLAQIGDQYADLFLAAKNLSDAILLSDILRVNTEITKAPLSASMIKRYDEHHQDLTLLKALVRQQLPEKYKEIFFDQSKNGYAGYIDGGASQEEFYKFIKPILEKMDGTEELLVKLNREDLLRKQRTFDNGSIPHQIHLGELHAILRRQEDFYPFLKDNREKIEKILTFRIPYYVGPLARGNSRFAWMTRKSEETITPWNFEEVVDKGASAQSFIERMTNFDKNLPNEKVLPKHSLLYEYFTVYNELTKVKYVTEGMRKPAFLSGEQKKAIVDLLFKTNRKVTVKQLKEDYFKKIECFDSVEISGVEDRFNASLGTYHDLLKIIKDKDFLDNEENEDILEDIVLTLTLFEDREMIEERLKTYAHLFDDKVMKQLKRRRYTGWGRLSRKLINGIRDKQSGKTILDFLKSDGFANRNFMQLIHDDSLTFKEDIQKAQVSGQGDSLHEHIANLAGSPAIKKGILQTVKVVDELVKVMGRHKPENIVIEMARENQTTQKGQKNSRERMKRIEEGIKELGSQILKEHPVENTQLQNEKLYLYYLQNGRDMYVDQELDINRLSDYDVDAIVPQSFLKDDSIDNKVLTRSDKNRGKSDNVPSEEVVKKMKNYWRQLLNAKLITQRKFDNLTKAERGGLSELDKAGFIKRQLVETRQITKHVAQILDSRMNTKYDENDKLIREVKVITLKSKLVSDFRKDFQFYKVREINNYHHAHDAYLNAVVGTALIKKYPKLESEFVYGDYKVYDVRKMIAKSEQEIGKATAKYFFYSNIMNFFKTEITLANGEIRKRPLIETNGETGEIVWDKGRDFATVRKVLSMPQVNIVKKTEVQTGGFSKESILPKRNSDKLIARKKDWDPKKYGGFDSPTVAYSVLVVAKVEKGKSKKLKSVKELLGITIMERSSFEKNPIDFLEAKGYKEVKKDLIIKLPKYSLFELENGRKRMLASAGELQKGNELALPSKYVNFLYLASHYEKLKGSPEDNEQKQLFVEQHKHYLDEIIEQISEFSKRVILADANLDKVLSAYNKHRDKPIREQAENIIHLFTLTNLGAPAAFKYFDTTIDRKRYTSTKEVLDATLIHQSITGLYETRIDLSQLGGD

SEQ ID NO: 81 - protein, 345 aa, Sulfolobus islandicus
MEVPLYNIFGDNYIIQVATEAENSTIYNNKVEIDDEELRNVLNLAYKIAKNNEDAAAERRGKAKKKKGEEGETTTSNIILPLSGNDKNPWTETLKCYNFPTTVALSEVFKNFSQVKECEEVSAPSFVKPEFYEFGRSPGMVERTRRVKLEVEPHYLIIAAAGWVLTRLGKAKVSEGDYVGVNVFTPTRGILYSLIQNVNGIVPGIKPETAFGLWIARKVVSSVTNPNVSVVRIYTISDAVGQNPTTINGGFSIDLTKLLEKRYLLSERLEAIARNALSISSNMRERYIVLANYIYEYLTGSKRLEDLLYFANRDLIMNLNSDDGKVRDLKLISAYVNGELIRGEG

SEQ ID NO: 82 - protein, 345 aa, Sulfolobus islandicus
MEVPLYNIFGDNYIIQVATEAENSTIYNNKVEIDDEELRNVLNLAYKIAKNNEDAAAERRGKAKKKKGEEGETTTSNIILPLSGNDKNPWTETLKCYNFPTTVALSEVFKNFSQVKECEEVSAPSFVKPEFYKFGRSPGMVERTRRVKLEVEPHYLIMAAAGWVLTRLGKAKVSEGDYVGVNVFTPTRGILYSLIQNVNGIVPGIKPETAFGLWIARKVVSSVTNPNVSVVSIYTISDAVGQNPTTINGGFSIDLTKLLEKRDLLSERLEAIARNALSISSNMRERYIVLANYIYEYLTGSKRLEDLLYFANRDLIMNLNSDDGKVRDLKLISAYVNGELIRGEG

SEQ ID NO: 83 - protein, 987 aa, Unknown
  Description of Unknown: deltaproteobacteria sequence
MEKRINKIRKKLSADNATKPVSRSGPMKTLLVRVMTDDLKKRLEKRRKKPEVMPQVISNNAANNLRMLLDDYTKMKEAILQVYWQEFKDDHVGLMCKFAQPASKKIDQNKLKPEMDEKGNLTTAGFACSQCGQPLFVYKLEQVSEKGKAYTNYFGRCNVAEHEKLILLAQLKPVKDSDEAVTYSLGKFGQRALDFYSIHVTKESTHPVKPLAQIAGNRYASGPVGKALSDACMGTIASFLSKYQDIIIEHQKVVKGNQKRLESLRELAGKENLEYPSVTLPPQPHTKEGVDFAYNEVIARVRMWVNLNLWQKLKLSRDDAKPLLRLKGFPSFPVVERRENEVDWWNTINEVKKLIDAKRDMGRVFWSGVTAEKRNTILEGYNYLPNENDHKKREGSLENPKKPAKRQFGDLLLYLEKKYAGDWGKVFDEAWERIDKKIAGLTSHIEREEARNAEDAQSKAVLTDWLRAKASFVLERLKEMDEKEFYACEIQLQKWYGDLRGNPFAVEAENRVVDISGFSIGSDGHSIQYRNLLAWKYLENGKREFYLLMNYGKKGRIRFTDGTDIKKSGKWQGLLYGGGKAKVIDLTFDPDDEQLIILPLAFGTRQGREFIWNDLLSLETGLIKLANGRVIEKTIYNKKIGRDEPALFVALTFERREVVDPSNIKPVNLIGVARGENIPAVIALTDPEGCPLPEFKDSSGGPTDILRIGEGYKEKQRAIQAAKEVEQRRAGGYSRKFASKSRNLADDMVRNSARDLFYHAVTHDAVLVFANLSRGFGRQGKRTFMTERQYTKMEDWLTAKLAYEGLTSKTYLSKTLAQYTSKTCSNCGFTITYADMDVMLVRLKKTSDGWATTLNNKELKAEYQITYYNRYKRQTVEKELSAELDRLSEESGNNDISKWTKGRRDEALFLLKKRFSHRPVQEQFVCLDCGHEVHAAEQAALNIARSWLFLNSNSTEFKSYKSGKQPFVGAWQAFYKRRLKEVWKPNA

SEQ ID NO: 84 - protein, 1210 aa, Unknown
  Description of Unknown: uncultured Parcubacteria group bacterium
MSKRHPRISGVKGYRLHAQRLEYTGKSGAMRTIKYPLYSSPSGGRTVPREIVSAINDDYVGLYGLSNFDDLYNAEKRNEEKVYSVLDFWYDCVQYGAVFSYTAPGLLKNVAEVRGGSYELTKTLKGSHLYDELQIDKVIKFLNKKEISRANGSLDKLKKDIIDCFKAEYRERHKDQCNKLADDIKNAKKDAGASLGERQKKLFRDFFGISEQSENDKPSFTNPLNLTCCLLPFDTVNNNRNRGEVLFNKLKEYAQKLDKNEGSLEMWEYIGIGNSGTAFSNFLGEGFLGRLRENKITELKKAMMDITDAWRGQEQEEELEKRLRILAALTIKLREPKFDNHWGGYRSDINGKLSSWLQNYINQTVKIKEDLKGHKKDLKKAKEMINRFGESDTKEEAVVSSLLESIEKIVPDDSADDEKPDIPAIAIYRRFLSDGRLTLNRFVQREDVQEALIKERLEAEKKKKPKKRKKKSDAEDEKETIDFKELFPHLAKPLKLVPNFYGDSKRELYKKYKNAAIYTDALWKAVEKIYKSAFSSSLKNSFFDTDFDKDFFIKRLQKIFSVYRRFNTDKWKPIVKNSFAPYCDIVSLAENEVLYKPKQSRSRKSAAIDKNRVRLPSTENIAKAGIALARELSVAGFDWKDLLKKEEHEEYIDLIELHKTALALLLAVTETQLDISALDFVENGTVKDFMKTRDGNLVLEGRFLEMFSQSIVFSELRGLAGLMSRKEFITRSAIQTMNGKQAELLYIPHEFQSAKITTPKEMSRAFLDLAPAEFATSLEPESLSEKSLLKLKQMRYYPHYFGYELTRTGQGIDGGVAENALRLEKSPVKKREIKCKQYKTLGRGQNKIVLYVRSSYYQTQFLEWFLHRPKNVQTDVAVSGSFLIDEKKVKTRWNYDALTVALEPVSGSERVFVSQPFTIFPEKSAEEEGQRYLGIDIGEYGIAYTALEITGDSAKILDQNFISDPQLKTLREEVKGLKLDQRRGTFAMPSTKIARIRESLVHSLRNRIHHLALKHKAKIVYELEVSRFEEGKQKIKKVYATLKKADVYSEIDADKNLQTTVWGKLAVASEISASYTSQFCGACKKLWRAEMQVDETITTQELIGTVRVIKGGTLIDAIKDFMRPPIFDENDTPFPKYRDFCDKHHISKKMRGNSCLFICPFCRANADADIQASQTIALLRYVKEEKKVEDYFERFRKLKNIKVLGQMKKI

SEQ ID NO: 85 - protein, 1129 aa, Alicyclobacillus acidoterrestris
MAVKSIKVKLRLDDMPEIRAGLWKLHKEVNAGVRYYTEWLSLLRQENLYRRSPNGDGEQECDKTAEECKAELLERLRARQVENGHRGPAGSDDELLQLARQLYELLVPQAIGAKGDAQQIARKFLSPLADKDAVGGLGIAKAGNKPRWVRMREAGEPGWEEEKEKAETRKSADRTADVLRALADFGLKPLMRVYTDSEMSSVEWKPLRKGQAVRTWDRDMFQQAIERMMSWESWNQRVGQEYAKLVEQKNRFEQKNFVGQEHLVHLVNQLQQDMKEASPGLESKEQTAHYVTGRALRGSDKVFEKWGKLAPDAPFDLYDAEIKNVQRRNTRRFGSHDLFAKLAEPEYQALWREDASFLTRYAVYNSILRKLNHAKMFATFTLPDATAHPIWTRFDKLGGNLHQYTFLFNEFGERRHAIRFHKLLKVENGVAREVDDVTVPISMSEQLDNLLPRDPNEPIALYFRDYGAEQHFTGEFGGAKIQCRRDQLAHMHRRRGARDVYLNVSVRVQSQSEARGERRPPYAAVFRLVGDNHRAFVHFDKLSDYLAEHPDDGKLGSEGLLSGLRVMSVDLGLRTSASISVFRVARKDELKPNSKGRVPFFFPIKGNDNLVAVHERSQLLKLPGETESKDLRAIREERQRTLRQLRTQLAYLRLLVRCGSEDVGRRERSWAKLIEQPVDAANHMTPDWREAFENELQKLKSLHGICSDKEWMDAVYESVRRVWRHMGKQVRDWRKDVRSGERPKIRGYAKDVVGGNSIEQIEYLERQYKFLKSWSFFGKVSGQVIRAEKGSRFAITLREHIDHAKEDRLKKLADRIIMEALGYVYALDERGKGKWVAKYPPCQLILLEELSEYQFNNDRPPSENNQLMQWSHRGVFQELINQAQVHDLLVGTMYAAFSSRFDARTGAPGIRCRRVPARCTQEHNPEPFPWWLNKFVVEHTLDACPLRADDLIPTGEGEIFVSPFSAEEGDFHQIHADLNAAQNLQQRLWSDFDISQIRLRCDWGEVDGELVLIPRLTGKRTADSYSNKVFYTNTGVTYYERERGKKRRKVFAQEKLSEEEAELLVEADEAREKSVVLMRDPSGIINRGNWTRQKEFWSMVNQRIEGYLVKQIRSRVPLQDSACENTGDI

SEQ ID NO: 86 - protein, 1140 aa, Bacillus hisashii
MAPKKKRKVGIHGVPAAATRSFILKIEPNEEVKKGLWKTHEVLNHGIAYYMNILKLIRQEAIYEHHEQDPKNPKKVSKAEIQAELWDFVLKMQKCNSFTHEVDKDEVFNILRELYEELVPSSVEKKGEANQLSNKFLYPLVDPNSQSGKGTASSGRKPRWYNLKIAGDPSWEEEKKKWEEDKKKDPLAKILGKLAEYGLIPLFIPYTDSNEPIVKEIKWMEKSRNQSVRRLDKDMFIQALERFLSWESWNLKVKEEYEKVEKEYKTLEERIKEDIQALKALEQYEKERQEQLLRDTLNTNEYRLSKRGLRGWREIIQKWLKMDENEPSEKYLEVFKDYQRKHPREAGDYSVYEFLSKKENHFIWRNHPEYPYLYATFCEIDKKKKDAKQQATFTLADPINHPLWVRFEERSGSNLNKYRILTEQLHTEKLKKKLTVQLDRLIYPTESGGWEEKGKVDIVLLPSRQFYNQIFLDIEEKGKHAFTYKDESIKFPLKGTLGGARVQFDRDHLRRYPHKVESGNVGRIYFNMTVNIEPTESPVSKSLKIHRDDFPKVVNFKPKELTEWIKDSKGKKLKSGIESLEIGLRVMSIDLGQRQAAAASIFEVVDQKPDIEGKLFFPIKGTELYAVHRASFNIKLPGETLVKSREVLRKAREDNLKLMNQKLNFLRNVLHFQQFEDITEREKRVTKWISRQENSDVPLVYQDELIQIRELMYKPYKDWVAFLKQLHKRLEVEIGKEVKHWRKSLSDGRKGLYGISLKNIDEIDRTRKFLLRWSLRPTEPGEVRRLEPGQRFAIDQLNHLNALKEDRLKKMANTIIMHALGYCYDVRKKKWQAKNPACQIILFEDLSNYNPYEERSRFENSKLMKWSRREIPRQVALQGEIYGLQVGEVGAQFSSRFHAKTGSPGIRCSVVTKEKLQDNRFFKNLQREGRLTLDKIAVLKEGDLYPDKGGEKFISLSKDRKCVTTHADINAAQNLQKRFWTRTHGFYKVYCKAYQVDGQTVYIPESKDQKQKIIEEFGEGYFILKDGVYEWVNAGKLKIKKGSSKQSSSELVDSDILKDSFDLASELKGEKLMLYRDPSGNVFPSDKWMAAGVFFGKLERILISKLTNQYSISTIEDDSSKQSMKRPAATKKAGQAKKKK

SEQ ID NO: 87 - protein, 1112 aa, Bacillus sp.
MAIRSIKLKMKTNSGTDSIYLRKALWRTHQLINEGIAYYMNLLTLYRQEAIGDKTKEAYQAELINIIRNQQRNNGSSEEHGSDQEILALLRQLYELIIPSSIGESGDANQLGNKFLYPLVDPNSQSGKGTSNAGRKPRWKRLKEEGNPDWELEKKKDEERKAKDPTVKIFDNLNKYGLLPLFPLFTNIQKDIEWLPLGKRQSVRKWDKDMFIQAIERLLSWESWNRRVADEYKQLKEKTESYYKEHLTGGEEWIEKIRKFEKERNMELEKNAFAPNDGYFITSRQIRGWDRVYEKWSKLPESASPEELWKVVAEQQNKMSEGFGDPKVFSFLANRENRDIWRGHSERIYHIAAYNGLQKKLSRTKEQATFTLPDAIEHPLWIRYESPGGTNLNLFKLEEKQKKNYYVTLSKIIWPSEEKWIEKENIEIPLAPSIQFNRQIKLKQHVKGKQEISFSDYSSRISLDGVLGGSRIQFNRKYIKNHKELLGEGDIGPVFFNLVVDVAPLQETRNGRLQSPIGKALKVISSDFSKVIDYKPKELMDWMNTGSASNSFGVASLLEGMRVMSIDMGQRTSASVSIFEVVKELPKDQEQKLFYSINDTELFAIHKRSFLLNLPGEVVTKNNKQQRQERRKKRQFVRSQIRMLANVLRLETKKTPDERKKAIHKLMEIVQSYDSWTASQKEVWEKELNLLTNMAAFNDEIWKESLVELHHRIEPYVGQIVSKWRKGLSEGRKNLAGISMWNIDELEDTRRLLISWSKRSRTPGEANRIETDEPFGSSLLQHIQNVKDDRLKQMANLIIMTALGFKYDKEEKDRYKRWKETYPACQIILFENLNRYLFNLDRSRRENSRLMKWAHRSIPRTVSMQGEMFGLQVGDVRSEYSSRFHAKTGAPGIRCHALTEEDLKAGSNTLKRLIEDGFINESELAYLKKGDIIPSQGGELFVTLSKRYKKDSDNNELTVIHADINAAQNLQKRFWQQNSEVYRVPCQLARMGEDKLYIPKSQTETIKKYFGKGSFVKNNTEQEVYKWEKSEKMKIKTDTTFDLQDLDGFEDISKTIELAQEQQKKYLTMFRDPSGYFFNNETWRPQKEYWSIVNNIIKSCLKKKILSNKVEL

SEQ ID NO: 88 - protein, 1300 aa, Francisella novicida
MSIYQEFVNKYSLSKTLRFELIPQGKTLENIKARGLILDDEKRAKDYKKAKQIIDKYHQFFIEEILSSVCISEDLLQNYSDVYFKLKKSDDDNLQKDFKSAKDTIKKQISEYIKDSEKFKNLFNQNLIDAKKGQESDLILWLKQSKDNGIELFKANSDITDIDEALEIIKSFKGWTTYFKGFHENRKNVYSSNDIPTSIIYRIVDDNLPKFLENKAKYESLKDKAPEAINYEQIKKDLAEELTFDIDYKTSEVNQRVFSLDEVFEIANFNNYLNQSGITKFNTIIGGKFVNGENTKRKGINEYINLYSQQINDKTLKKYKMSVLFKQILSDTESKSFVIDKLEDDSDVVTTMQSFYEQIAAFKTVEEKSIKETLSLLFDDLKAQKLDLSKIYFKNDKSLTDLSQQVFDDYSVIGTAVLEYITQQIAPKNLDNPSKKEQELIAKKTEKAKYLSLETIKLALEEFNKHRDIDKQCRFEEILANFAAIPMIFDEIAQNKDNLAQISIKYQNQGKKDLLQASAEDDVKAIKDLLDQTNNLLHKLKIFHISQSEDKANILDKDEHFYLVFEECYFELANIVPLYNKIRNYITQKPYSDEKFKLNFENSTLANGWDKNKEPDNTAILFIKDDKYYLGVMNKKNNKIFDDKAIKENKGEGYKKIVYKLLPGANKMLPKVFFSAKSIKFYNPSEDILRIRNHSTHTKNGSPQKGYEKFEFNIEDCRKFIDFYKQSISKHPEWKDFGFRFSDTQRYNSIDEFYREVENQGYKLTFENISESYIDSVVNQGKLYLFQIYNKDFSAYSKGRPNLHTLYWKALFDERNLQDVVYKLNGEAELFYRKQSIPKKITHPAKEAIANKNKDNPKKESVFEYDLIKDKRFTEDKFFFHCPITINFKSSGANKFNDEINLLLKEKANDVHILSIDRGERHLAYYTLVDGKGNIIKQDTFNIIGNDRMKTNYHDKLAAIEKDRDSARKDWKKINNIKEMKEGYLSQVVHEIAKLVIEYNAIVVFEDLNFGFKRGRFKVEKQVYQKLEKMLIEKLNYLVFKDNEFDKTGGVLRAYQLTAPFETFKKMGKQTGIIYYVPAGFTSKICPVTGFVNQLYPKYESVSKSQEFFSKFDKICYNLDKGYFEFSFDYKNFGDKAAKGKWTIASFGSRLINFRNSDKNHNWDTREVYPTKELEKLLKDYSIEYGHGECIKAAICGESDKKFFAKLTSVLNTILQMRNSKTGTELDYLISPVADVNGNFFDSRQAPKNMPQDADANGAYHIGLKGLMLLGRIKNNQEGKKLNLVIKNEEYFEFVQNRNN

SEQ ID NO: 89 - protein, 1300 aa, Francisella novicida
MSIYQEFVNKYSLSKTLRFELIPQGKTLENIKARGLILDDEKRAKDYKKAKQIIDKYHQFFIEEILSSVCISEDLLQNYSDVYFKLKKSDDDNLQKDFKSAKDTIKKQISEYIKDSEKFKNLFNQNLIDAKKGQESDLILWLKQSKDNGIELFKANSDITDIDEALEIIKSFKGWTTYFKGFHENRKNVYSSNDIPTSIIYRIVDDNLPKFLENKAKYESLKDKAPEAINYEQIKKDLAEELTFDIDYKTSEVNQRVFSLDEVFEIANFNNYLNQSGITKFNTIIGGKFVNGENTKRKGINEYINLYSQQINDKTLKKYKMSVLFKQILSDTESKSFVIDKLEDDSDVVTTMQSFYEQIAAFKTVEEKSIKETLSLLFDDLKAQKLDLSKIYFKNDKSLTDLSQQVFDDYSVIGTAVLEYITQQIAPKNLDNPSKKEQELIAKKTEKAKYLSLETIKLALEEFNKHRDIDKQCRFEEILANFAAIPMIFDEIAQNKDNLAQISIKYQNQGKKDLLQASAEDDVKAIKDLLDQTNNLLHKLKIFHISQSEDKANILDKDEHFYLVFEECYFELANIVPLYNKIRNYITQKPYSDEKFKLNFENSTLANGWDKNKEPDNTAILFIKDDKYYLGVMNKKNNKIFDDKAIKENKGEGYKKIVYKLLPGANKMLPKVFFSAKSIKFYNPSEDILRIRNHSTHTKNGSPQKGYEKFEFNIEDCRKFIDFYKQSISKHPEWKDFGFRFSDTQRYNSIDEFYREVENQGYKLTFENISESYIDSVVNQGKLYLFQIYNKDFSAYSKGRPNLHTLYWKALFDERNLQDVVYKLNGEAELFYRKQSIPKKITHPAKEAIANKNKDNPKKESVFEYDLIKDKRFTEDKFFFHCPITINFKSSGANKFNDEINLLLKEKANDVHILSIARGERHLAYYTLVDGKGNIIKQDTFNIIGNDRMKTNYHDKLAAIEKDRDSARKDWKKINNIKEMKEGYLSQVVHEIAKLVIEYNAIVVFEDLNFGFKRGRFKVEKQVYQKLEKMLIEKLNYLVFKDNEFDKTGGVLRAYQLTAPFETFKKMGKQTGIIYYVPAGFTSKICPVTGFVNQLYPKYESVSKSQEFFSKFDKICYNLDKGYFEFSFDYKNFGDKAAKGKWTIASFGSRLINFRNSDKNHNWDTREVYPTKELEKLLKDYSIEYGHGECIKAAICGESDKKFFAKLTSVLNTILQMRNSKTGTELDYLISPVADVNGNFFDSRQAPKNMPQDADANGAYHIGLKGLMLLGRIKNNQEGKKLNLVIKNEEYFEFVQNRNN

SEQ ID NO: 90 - protein, 1300 aa, Francisella novicida
MSIYQEFVNKYSLSKTLRFELIPQGKTLENIKARGLILDDEKRAKDYKKAKQIIDKYHQFFIEEILSSVCISEDLLQNYSDVYFKLKKSDDDNLQKDFKSAKDTIKKQISEYIKDSEKFKNLFNQNLIDAKKGQESDLILWLKQSKDNGIELFKANSDITDIDEALEIIKSFKGWTTYFKGFHENRKNVYSSNDIPTSIIYRIVDDNLPKFLENKAKYESLKDKAPEAINYEQIKKDLAEELTFDIDYKTSEVNQRVFSLDEVFEIANFNNYLNQSGITKFNTIIGGKFVNGENTKRKGINEYINLYSQQINDKTLKKYKMSVLFKQILSDTESKSFVIDKLEDDSDVVTTMQSFYEQIAAFKTVEEKSIKETLSLLFDDLKAQKLDLSKIYFKNDKSLTDLSQQVFDDYSVIGTAVLEYITQQIAPKNLDNPSKKEQELIAKKTEKAKYLSLETIKLALEEFNKHRDIDKQCRFEEILANFAAIPMIFDEIAQNKDNLAQISIKYQNQGKKDLLQASAEDDVKAIKDLLDQTNNLLHKLKIFHISQSEDKANILDKDEHFYLVFEECYFELANIVPLYNKIRNYITQKPYSDEKFKLNFENSTLANGWDKNKEPDNTAILFIKDDKYYLGVMNKKNNKIFDDKAIKENKGEGYKKIVYKLLPGANKMLPKVFFSAKSIKFYNPSEDILRIRNHSTHTKNGSPQKGYEKFEFNIEDCRKFIDFYKQSISKHPEWKDFGFRFSDTQRYNSIDEFYREVENQGYKLTFENISESYIDSVVNQGKLYLFQIYNKDFSAYSKGRPNLHTLYWKALFDERNLQDVVYKLNGEAELFYRKQSIPKKITHPAKEAIANKNKDNPKKESVFEYDLIKDKRFTEDKFFFHCPITINFKSSGANKFNDEINLLLKEKANDVHILSIDRGERHLAYYTLVDGKGNIIKQDTFNIIGNDRMKTNYHDKLAAIEKDRDSARKDWKKINNIKEMKEGYLSQVVHEIAKLVIEYNAIVVFADLNFGFKRGRFKVEKQVYQKLEKMLIEKLNYLVFKDNEFDKTGGVLRAYQLTAPFETFKKMGKQTGIIYYVPAGFTSKICPVTGFVNQLYPKYESVSKSQEFFSKFDKICYNLDKGYFEFSFDYKNFGDKAAKGKWTIASFGSRLINFRNSDKNHNWDTREVYPTKELEKLLKDYSIEYGHGECIKAAICGESDKKFFAKLTSVLNTILQMRNSKTGTELDYLISPVADVNGNFFDSRQAPKNMPQDADANGAYHIGLKGLMLLGRIKNNQEGKKLNLVIKNEEYFEFVQNRNN

SEQ ID NO: 91 - protein, 1300 aa, Francisella novicida
MSIYQEFVNKYSLSKTLRFELIPQGKTLENIKARGLILDDEKRAKDYKKAKQIIDKYHQFFIEEILSSVCISEDLLQNYSDVYFKLKKSDDDNLQKDFKSAKDTIKKQISEYIKDSEKFKNLFNQNLIDAKKGQESDLILWLKQSKDNGIELFKANSDITDIDEALEIIKSFKGWTTYFKGFHENRKNVYSSNDIPTSIIYRIVDDNLPKFLENKAKYESLKDKAPEAINYEQIKKDLAEELTFDIDYKTSEVNQRVFSLDEVFEIANFNNYLNQSGITKFNTIIGGKFVNGENTKRKGINEYINLYSQQINDKTLKKYKMSVLFKQILSDTESKSFVIDKLEDDSDVVTTMQSFYEQIAAFKTVEEKSIKETLSLLFDDLKAQKLDLSKIYFKNDKSLTDLSQQVFDDYSVIGTAVLEYITQQIAPKNLDNPSKKEQELIAKKTEKAKYLSLETIKLALEEFNKHRDIDKQCRFEEILANFAAIPMIFDEIAQNKDNLAQISIKYQNQGKKDLLQASAEDDVKAIKDLLDQTNNLLHKLKIFHISQSEDKANILDKDEHFYLVFEECYFELANIVPLYNKIRNYITQKPYSDEKFKLNFENSTLANGWDKNKEPDNTAILFIKDDKYYLGVMNKKNNKIFDDKAIKENKGEGYKKIVYKLLPGANKMLPKVFFSAKSIKFYNPSEDILRIRNHSTHTKNGSPQKGYEKFEFNIEDCRKFIDFYKQSISKHPEWKDFGFRFSDTQRYNSIDEFYREVENQGYKLTFENISESYIDSVVNQGKLYLFQIYNKDFSAYSKGRPNLHTLYWKALFDERNLQDVVYKLNGEAELFYRKQSIPKKITHPAKEAIANKNKDNPKKESVFEYDLIKDKRFTEDKFFFHCPITINFKSSGANKFNDEINLLLKEKANDVHILSIDRGERHLAYYTLVDGKGNIIKQDTFNIIGNDRMKTNYHDKLAAIEKDRDSARKDWKKINNIKEMKEGYLSQVVHEIAKLVIEYNAIVVFEDLNFGFKRGRFKVEKQVYQKLEKMLIEKLNYLVFKDNEFDKTGGVLRAYQLTAPFETFKKMGKQTGIIYYVPAGFTSKICPVTGFVNQLYPKYESVSKSQEFFSKFDKICYNLDKGYFEFSFDYKNFGDKAAKGKWTIASFGSRLINFRNSDKNHNWDTREVYPTKELEKLLKDYSIEYGHGECIKAAICGESDKKFFAKLTSVLNTILQMRNSKTGTELDYLISPVADVNGNFFDSRQAPKNMPQDAAANGAYHIGLKGLMLLGRIKNNQEGKKLNLVIKNEEYFEFVQNRNN

SEQ ID NO: 92 - protein, 1300 aa, Francisella novicida
MSIYQEFVNKYSLSKTLRFELIPQGKTLENIKARGLILDDEKRAKDYKKAKQIIDKYHQFFIEEILSSVCISEDLLQNYSDVYFKLKKSDDDNLQKDFKSAKDTIKKQISEYIKDSEKFKNLFNQNLIDAKKGQESDLILWLKQSKDNGIELFKANSDITDIDEALEIIKSFKGWTTYFKGFHENRKNVYSSNDIPTSIIYRIVDDNLPKFLENKAKYESLKDKAPEAINYEQIKKDLAEELTFDIDYKTSEVNQRVFSLDEVFEIANFNNYLNQSGITKFNTIIGGKFVNGENTKRKGINEYINLYSQQINDKTLKKYKMSVLFKQILSDTESKSFVIDKLEDDSDVVTTMQSFYEQIAAFKTVEEKSIKETLSLLFDDLKAQKLDLSKIYFKNDKSLTDLSQQVFDDYSVIGTAVLEYITQQIAPKNLDNPSKKEQELIAKKTEKAKYLSLETIKLALEEFNKHRDIDKQCRFEEILANFAAIPMIFDEIAQNKDNLAQISIKYQNQGKKDLLQASAEDDVKAIKDLLDQTNNLLHKLKIFHISQSEDKANILDKDEHFYLVFEECYFELANIVPLYNKIRNYITQKPYSDEKFKLNFENSTLANGWDKNKEPDNTAILFIKDDKYYLGVMNKKNNKIFDDKAIKENKGEGYKKIVYKLLPGANKMLPKVFFSAKSIKFYNPSEDILRIRNHSTHTKNGSPQKGYEKFEFNIEDCRKFIDFYKQSISKHPEWKDFGFRFSDTQRYNSIDEFYREVENQGYKLTFENISESYIDSVVNQGKLYLFQIYNKDFSAYSKGRPNLHTLYWKALFDERNLQDVVYKLNGEAELFYRKQSIPKKITHPAKEAIANKNKDNPKKESVFEYDLIKDKRFTEDKFFFHCPITINFKSSGANKFNDEINLLLKEKANDVHILSIARGERHLAYYTLVDGKGNIIKQDTFNIIGNDRMKTNYHDKLAAIEKDRDSARKDWKKINNIKEMKEGYLSQVVHEIAKLVIEYNAIVVFADLNFGFKRGRFKVEKQVYQKLEKMLIEKLNYLVFKDNEFDKTGGVLRAYQLTAPFETFKKMGKQTGIIYYVPAGFTSKICPVTGFVNQLYPKYESVSKSQEFFSKFDKICYNLDKGYFEFSFDYKNFGDKAAKGKWTIASFGSRLINFRNSDKNHNWDTREVYPTKELEKLLKDYSIEYGHGECIKAAICGESDKKFFAKLTSVLNTILQMRNSKTGTELDYLISPVADVNGNFFDSRQAPKNMPQDADANGAYHIGLKGLMLLGRIKNNQEGKKLNLVIKNEEYFEFVQNRNN

SEQ ID NO: 93 - protein, 1300 aa, Francisella novicida
MSIYQEFVNKYSLSKTLRFELIPQGKTLENIKARGLILDDEKRAKDYKKAKQIIDKYHQFFIEEILSSVCISEDLLQNYSDVYFKLKKSDDDNLQKDFKSAKDTIKKQISEYIKDSEKFKNLFNQNLIDAKKGQESDLILWLKQSKDNGIELFKANSDITDIDEALEIIKSFKGWTTYFKGFHENRKNVYSSNDIPTSIIYRIVDDNLPKFLENKAKYESLKDKAPEAINYEQIKKDLAEELTFDIDYKTSEVNQRVFSLDEVFEIANFNNYLNQSGITKFNTIIGGKFVNGENTKRKGINEYINLYSQQINDKTLKKYKMSVLFKQILSDTESKSFVIDKLEDDSDVVTTMQSFYEQIAAFKTVEEKSIKETLSLLFDDLKAQKLDLSKIYFKNDKSLTDLSQQVFDDYSVIGTAVLEYITQQIAPKNLDNPSKKEQELIAKKTEKAKYLSLETIKLALEEFNKHRDIDKQCRFEEILANFAAIPMIFDEIAQNKDNLAQISIKYQNQGKKDLLQASAEDDVKAIKDLLDQTNNLLHKLKIFHISQSEDKANILDKDEHFYLVFEECYFELANIVPLYNKIRNYITQKPYSDEKFKLNFENSTLANGWDKNKEPDNTAILFIKDDKYYLGVMNKKNNKIFDDKAIKENKGEGYKKIVYKLLPGANKMLPKVFFSAKSIKFYNPSEDILRIRNHSTHTKNGSPQKGYEKFEFNIEDCRKFIDFYKQSISKHPEWKDFGFRFSDTQRYNSIDEFYREVENQGYKLTFENISESYIDSVVNQGKLYLFQIYNKDFSAYSKGRPNLHTLYWKALFDERNLQDVVYKLNGEAELFYRKQSIPKKITHPAKEAIANKNKDNPKKESVFEYDLIKDKRFTEDKFFFHCPITINFKSSGANKFNDEINLLLKEKANDVHILSIARGERHLAYYTLVDGKGNIIKQDTFNIIGNDRMKTNYHDKLAAIEKDRDSARKDWKKINNIKEMKEGYLSQVVHEIAKLVIEYNAIVVFEDLNFGFKRGRFKVEKQVYQKLEKMLIEKLNYLVFKDNEFDKTGGVLRAYQLTAPFETFKKMGKQTGIIYYVPAGFTSKICPVTGFVNQLYPKYESVSKSQEFFSKFDKICYNLDKGYFEFSFDYKNFGDKAAKGKWTIASFGSRLINFRNSDKNHNWDTREVYPTKELEKLLKDYSIEYGHGECIKAAICGESDKKFFAKLTSVLNTILQMRNSKTGTELDYLISPVADVNGNFFDSRQAPKNMPQDAAANGAYHIGLKGLMLLGRIKNNQEGKKLNLVIKNEEYFEFVQNRNN

SEQ ID NO: 94 - protein, 1300 aa, Francisella novicida
MSIYQEFVNKYSLSKTLRFELIPQGKTLENIKARGLILDDEKRAKDYKKAKQIIDKYHQFFIEEILSSVCISEDLLQNYSDVYFKLKKSDDDNLQKDFKSAKDTIKKQISEYIKDSEKFKNLFNQNLIDAKKGQESDLILWLKQSKDNGIELFKANSDITDIDEALEIIKSFKGWTTYFKGFHENRKNVYSSNDIPTSIIYRIVDDNLPKFLENKAKYESLKDKAPEAINYEQIKKDLAEELTFDIDYKTSEVNQRVFSLDEVFEIANFNNYLNQSGITKFNTIIGGKFVNGENTKRKGINEYINLYSQQINDKTLKKYKMSVLFKQILSDTESKSFVIDKLEDDSDVVTTMQSFYEQIAAFKTVEEKSIKETLSLLFDDLKAQKLDLSKIYFKNDKSLTDLSQQVFDDYSVIGTAVLEYITQQIAPKNLDNPSKKEQELIAKKTEKAKYLSLETIKLALEEFNKHRDIDKQCRFEEILANFAAIPMIFDEIAQNKDNLAQISIKYQNQGKKDLLQASAEDDVKAIKDLLDQTNNLLHKLKIFHISQSEDKANILDKDEHFYLVFEECYFELANIVPLYNKIRNYITQKPYSDEKFKLNFENSTLANGWDKNKEPDNTAILFIKDDKYYLGVMNKKNNKIFDDKAIKENKGEGYKKIVYKLLPGANKMLPKVFFSAKSIKFYNPSEDILRIRNHSTHTKNGSPQKGYEKFEFNIEDCRKFIDFYKQSISKHPEWKDFGFRFSDTQRYNSIDEFYREVENQGYKLTFENISESYIDSVVNQGKLYLFQIYNKDFSAYSKGRPNLHTLYWKALFDERNLQDVVYKLNGEAELFYRKQSIPKKITHPAKEAIANKNKDNPKKESVFEYDLIKDKRFTEDKFFFHCPITINFKSSGANKFNDEINLLLKEKANDVHILSIDRGERHLAYYTLVDGKGNIIKQDTFNIIGNDRMKTNYHDKLAAIEKDRDSARKDWKKINNIKEMKEGYLSQVVHEIAKLVIEYNAIVVFADLNFGFKRGRFKVEKQVYQKLEKMLIEKLNYLVFKDNEFDKTGGVLRAYQLTAPFETFKKMGKQTGIIYYVPAGFTSKICPVTGFVNQLYPKYESVSKSQEFFSKFDKICYNLDKGYFEFSFDYKNFGDKAAKGKWTIASFGSRLINFRNSDKNHNWDTREVYPTKELEKLLKDYSIEYGHGECIKAAICGESDKKFFAKLTSVLNTILQMRNSKTGTELDYLISPVADVNGNFFDSRQAPKNMPQDAAANGAYHIGLKGLMLLGRIKNNQEGKKLNLVIKNEEYFEFVQNRNN

SEQ ID NO: 95 - protein, 1300 aa, Francisella novicida
MSIYQEFVNKYSLSKTLRFELIPQGKTLENIKARGLILDDEKRAKDYKKAKQIIDKYHQFFIEEILSSVCISEDLLQNYSDVYFKLKKSDDDNLQKDFKSAKDTIKKQISEYIKDSEKFKNLFNQNLIDAKKGQESDLILWLKQSKDNGIELFKANSDITDIDEALEIIKSFKGWTTYFKGFHENRKNVYSSNDIPTSIIYRIVDDNLPKFLENKAKYESLKDKAPEAINYEQIKKDLAEELTFDIDYKTSEVNQRVFSLDEVFEIANFNNYLNQSGITKFNTIIGGKFVNGENTKRKGINEYINLYSQQINDKTLKKYKMSVLFKQILSDTESKSFVIDKLEDDSDVVTTMQSFYEQIAAFKTVEEKSIKETLSLLFDDLKAQKLDLSKIYFKNDKSLTDLSQQVFDDYSVIGTAVLEYITQQIAPKNLDNPSKKEQELIAKKTEKAKYLSLETIKLALEEFNKHRDIDKQCRFEEILANFAAIPMIFDEIAQNKDNLAQISIKYQNQGKKDLLQASAEDDVKAIKDLLDQTNNLLHKLKIFHISQSEDKANILDKDEHFYLVFEECYFELANIVPLYNKIRNYITQKPYSDEKFKLNFENSTLANGWDKNKEPDNTAILFIKDDKYYLGVMNKKNNKIFDDKAIKENKGEGYKKIVYKLLPGANKMLPKVFFSAKSIKFYNPSEDILRIRNHSTHTKNGSPQKGYEKFEFNIEDCRKFIDFYKQSISKHPEWKDFGFRFSDTQRYNSIDEFYREVENQGYKLTFENISESYIDSVVNQGKLYLFQIYNKDFSAYSKGRPNLHTLYWKALFDERNLQDVVYKLNGEAELFYRKQSIPKKITHPAKEAIANKNKDNPKKESVFEYDLIKDKRFTEDKFFFHCPITINFKSSGANKFNDEINLLLKEKANDVHILSIARGERHLAYYTLVDGKGNIIKQDTFNIIGNDRMKTNYHDKLAAIEKDRDSARKDWKKINNIKEMKEGYLSQVVHEIAKLVIEYNAIVVFADLNFGFKRGRFKVEKQVYQKLEKMLIEKLNYLVFKDNEFDKTGGVLRAYQLTAPFETFKKMGKQTGIIYYVPAGFTSKICPVTGFVNQLYPKYESVSKSQEFFSKFDKICYNLDKGYFEFSFDYKNFGDKAAKGKWTIASFGSRLINFRNSDKNHNWDTREVYPTKELEKLLKDYSIEYGHGECIKAAICGESDKKFFAKLTSVLNTILQMRNSKTGTELDYLISPVADVNGNFFDSRQAPKNMPQDAAANGAYHIGLKGLMLLGRIKNNQEGKKLNLVIKNEEYFEFVQNRNN

SEQ ID NO: 96 - protein, 1053 aa, Staphylococcus aureus
MKRNYILGLDIGITSVGYGIIDYETRDVIDAGVRLFKEANVENNEGRRSKRGARRLKRRRRHRIQRVKKLLFDYNLLTDHSELSGINPYEARVKGLSQKLSEEEFSAALLHLAKRRGVHNVNEVEEDTGNELSTKEQISRNSKALEEKYVAELQLERLKKDGEVRGSINRFKTSDYVKEAKQLLKVQKAYHQLDQSFIDTYIDLLETRRTYYEGPGEGSPFGWKDIKEWYEMLMGHCTYFPEELRSVKYAYNADLYNALNDLNNLVITRDENEKLEYYEKFQIIENVFKQKKKPTLKQIAKEILVNEEDIKGYRVTSTGKPEFTNLKVYHDIKDITARKEIIENAELLDQIAKILTIYQSSEDIQEELTNLNSELTQEEIEQISNLKGYTGTHNLSLKAINLILDELWHTNDNQIAIFNRLKLVPKKVDLSQQKEIPTTLVDDFILSPVVKRSFIQSIKVINAIIKKYGLPNDIIIELAREKNSKDAQKMINEMQKRNRQTNERIEEIIRTTGKENAKYLIEKIKLHDMQEGKCLYSLEAIPLEDLLNNPFNYEVDHIIPRSVSFDNSFNNKVLVKQEENSKKGNRTPFQYLSSSDSKISYETFKKHILNLAKGKGRISKTKKEYLLEERDINRFSVQKDFINRNLVDTRYATRGLMNLLRSYFRVNNLDVKVKSINGGFTSFLRRKWKFKKERNKGYKHHAEDALIIANADFIFKEWKKLDKAKKVMENQMFEEKQAESMPEIETEQEYKEIFITPHQIKHIKDFKDYKYSHRVDKKPNRELINDTLYSTRKDDKGNTLIVNNLNGLYDKDNDKLKKLINKSPEKLLMYHHDPQTYQKLKLIMEQYGDEKNPLYKYYEETGNYLTKYSKKDNGPVIKKIKYYGNKLNAHLDITDDYPNSRNKVVKLSLKPYRFDVYLDNGVYKFVTVKNLDVIKKENYYEVNSKCYEEAKKLKKISNQAEFIASFYNNDLIKINGELYRVIGVNNDLLNRIEVNMIDITYREYLENMNDKRPPRIIKTIASKTQSIKKYSTDILGNLYEVKSKKHPQIIKKG

SEQ ID NO: 97 - protein, 1052 aa, Staphylococcus aureus
KRNYILGLDIGITSVGYGIIDYETRDVIDAGVRLFKEANVENNEGRRSKRGARRLKRRRRHRIQRVKKLLFDYNLLTDHSELSGINPYEARVKGLSQKLSEEEFSAALLHLAKRRGVHNVNEVEEDTGNELSTKEQISRNSKALEEKYVAELQLERLKKDGEVRGSINRFKTSDYVKEAKQLLKVQKAYHQLDQSFIDTYIDLLETRRTYYEGPGEGSPFGWKDIKEWYEMLMGHCTYFPEELRSVKYAYNADLYNALNDLNNLVITRDENEKLEYYEKFQIIENVFKQKKKPTLKQIAKEILVNEEDIKGYRVTSTGKPEFTNLKVYHDIKDITARKEIIENAELLDQIAKILTIYQSSEDIQEELTNLNSELTQEEIEQISNLKGYTGTHNLSLKAINLILDELWHTNDNQIAIFNRLKLVPKKVDLSQQKEIPTTLVDDFILSPVVKRSFIQSIKVINAIIKKYGLPNDIIIELAREKNSKDAQKMINEMQKRNRQTNERIEEIIRTTGKENAKYLIEKIKLHDMQEGKCLYSLEAIPLEDLLNNPFNYEVDHIIPRSVSFDNSFNNKVLVKQEEASKKGNRTPFQYLSSSDSKISYETFKKHILNLAKGKGRISKTKKEYLLEERDINRFSVQKDFINRNLVDTRYATRGLMNLLRSYFRVNNLDVKVKSINGGFTSFLRRKWKFKKERNKGYKHHAEDALIIANADFIFKEWKKLDKAKKVMENQMFEEKQAESMPEIETEQEYKEIFITPHQIKHIKDFKDYKYSHRVDKKPNRELINDTLYSTRKDDKGNTLIVNNLNGLYDKDNDKLKKLINKSPEKLLMYHHDPQTYQKLKLIMEQYGDEKNPLYKYYEETGNYLTKYSKKDNGPVIKKIKYYGNKLNAHLDITDDYPNSRNKVVKLSLKPYRFDVYLDNGVYKFVTVKNLDVIKKENYYEVNSKCYEEAKKLKKISNQAEFIASFYNNDLIKINGELYRVIGVNNDLLNRIEVNMIDITYREYLENMNDKRPPRIIKTIASKTQSIKKYSTDILGNLYEVKSKKHPQIIKKG

SEQ ID NO: 98 - protein, 1052 aa, Staphylococcus aureus
KRNYILGLDIGITSVGYGIIDYETRDVIDAGVRLFKEANVENNEGRRSKRGARRLKRRRRHRIQRVKKLLFDYNLLTDHSELSGINPYEARVKGLSQKLSEEEFSAALLHLAKRRGVHNVNEVEEDTGNELSTKEQISRNSKALEEKYVAELQLERLKKDGEVRGSINRFKTSDYVKEAKQLLKVQKAYHQLDQSFIDTYIDLLETRRTYYEGPGEGSPFGWKDIKEWYEMLMGHCTYFPEELRSVKYAYNADLYNALNDLNNLVITRDENEKLEYYEKFQIIENVFKQKKKPTLKQIAKEILVNEEDIKGYRVTSTGKPEFTNLKVYHDIKDITARKEIIENAELLDQIAKILTIYQSSEDIQEELTNLNSELTQEEIEQISNLKGYTGTHNLSLKAINLILDELWHTNDNQIAIFNRLKLVPKKVDLSQQKEIPTTLVDDFILSPVVKRSFIQSIKVINAIIKKYGLPNDIIIELAREKNSKDAQKMINEMQKRNRQTNERIEEIIRTTGKENAKYLIEKIKLHDMQEGKCLYSLEAIPLEDLLNNPFNYEVDHIIPRSVSFDNSFNNKVLVKQEEASKKGNRTPFQYLSSSDSKISYETFKKHILNLAKGKGRISKTKKEYLLEERDINRFSVQKDFINRNLVDTRYATRGLMNLLRSYFRVNNLDVKVKSINGGFTSFLRRKWKFKKERNKGYKHHAEDALIIANADFIFKEWKKLDKAKKVMENQMFEEKQAESMPEIETEQEYKEIFITPHQIKHIKDFKDYKYSHRVDKKPNRKLINDTLYSTRKDDKGNTLIVNNLNGLYDKDNDKLKKLINKSPEKLLMYHHDPQTYQKLKLIMEQYGDEKNPLYKYYEETGNYLTKYSKKDNGPVIKKIKYYGNKLNAHLDITDDYPNSRNKVVKLSLKPYRFDVYLDNGVYKFVTVKNLDVIKKENYYEVNSKCYEEAKKLKKISNQAEFIASFYKNDLIKINGELYRVIGVNNDLLNRIEVNMIDITYREYLENMNDKRPPHIIKTIASKTQSIKKYSTDILGNLYEVKSKKHPQIIKKG

SEQ ID NO: 99 - protein, 1368 aa, Artificial Sequence
  Description of Artificial Sequence: Synthetic polypeptide
MDKKYSIGLAIGTNSVGWAVITDEYKVPSKKFKVLGNTDRHSIKKNLIGALLFDSGETAEATRLKRTARRRYTRRKNRICYLQEIFSNEMAKVDDSFFHRLEESFLVEEDKKHERHPIFGNIVDEVAYHEKYPTIYHLRKKLVDSTDKADLRLIYLALAHMIKFRGHFLIEGDLNPDNSDVDKLFIQLVQTYNQLFEENPINASGVDAKAILSARLSKSRRLENLIAQLPGEKKNGLFGNLIALSLGLTPNFKSNFDLAEDAKLQLSKDTYDDDLDNLLAQIGDQYADLFLAAKNLSDAILLSDILRVNTEITKAPLSASMIKRYDEHHQDLTLLKALVRQQLPEKYKEIFFDQSKNGYAGYIDGGASQEEFYKFIKPILEKMDGTEELLVKLNREDLLRKQRTFDNGSIPHQIHLGELHAILRRQEDFYPFLKDNREKIEKILTFRIPYYVGPLARGNSRFAWMTRKSEETITPWNFEEVVDKGASAQSFIERMTAFDKNLPNEKVLPKHSLLYEYFTVYNELTKVKYVTEGMRKPAFLSGEQKKAIVDLLFKTNRKVTVKQLKEDYFKKIECFDSVEISGVEDRFNASLGTYHDLLKIIKDKDFLDNEENEDILEDIVLTLTLFEDREMIEERLKTYAHLFDDKVMKQLKRRRYTGWGALSRKLINGIRDKQSGKTILDFLKSDGFANRNFMALIHDDSLTFKEDIQKAQVSGQGDSLHEHIANLAGSPAIKKGILQTVKVVDELVKVMGRHKPENIVIEMARENQTTQKGQKNSRERMKRIEEGIKELGSQILKEHPVENTQLQNEKLYLYYLQNGRDMYVDQELDINRLSDYDVDHIVPQSFLKDDSIDNKVLTRSDKNRGKSDNVPSEEVVKKMKNYWRQLLNAKLITQRKFDNLTKAERGGLSELDKAGFIKRQLVETRAITKHVAQILDSRMNTKYDENDKLIREVKVITLKSKLVSDFRKDFQFYKVREINNYHHAHDAYLNAVVGTALIKKYPKLESEFVYGDYKVYDVRKMIAKSEQEIGKATAKYFFYSNIMNFFKTEITLANGEIRKRPLIETNGETGEIVWDKGRDFATVRKVLSMPQVNIVKKTEVQTGGFSKESILPKRNSDKLIARKKDWDPKKYGGFDSPTVAYSVLVVAKVEKGKSKKLKSVKELLGITIMERSSFEKNPIDFLEAKGYKEVKKDLIIKLPKYSLFELENGRKRMLASAGELQKGNELALPSKYVNFLYLASHYEKLKGSPEDNEQKQLFVEQHKHYLDEIIEQISEFSKRVILADANLDKVLSAYNKHRDKPIREQAENIIHLFTLTNLGAPAAFKYFDTTIDRKRYTSTKEVLDATLIHQSITGLYETRIDLSQLGGD

SEQ ID NO: 100 - protein, 1368 aa, Streptococcus pyogenes
MDKKYSIGLAIGTNSVGWAVITDEYKVPSKKFKVLGNTDRHSIKKNLIGALLFDSGETAEATRLKRTARRRYTRRKNRICYLQEIFSNEMAKVDDSFFHRLEESFLVEEDKKHERHPIFGNIVDEVAYHEKYPTIYHLRKKLVDSTDKADLRLIYLALAHMIKFRGHFLIEGDLNPDNSDVDKLFIQLVQTYNQLFEENPINASGVDAKAILSARLSKSRRLENLIAQLPGEKKNGLFGNLIALSLGLTPNFKSNFDLAEDAKLQLSKDTYDDDLDNLLAQIGDQYADLFLAAKNLSDAILLSDILRVNTEITKAPLSASMIKRYDEHHQDLTLLKALVRQQLPEKYKEIFFDQSKNGYAGYIDGGASQEEFYKFIKPILEKMDGTEELLVKLNREDLLRKQRTFDNGSIPHQIHLGELHAILRRQEDFYPFLKDNREKIEKILTFRIPYYVGPLARGNSRFAWMTRKSEETITPWNFEEVVDKGASAQSFIERMTNFDKNLPNEKVLPKHSLLYEYFTVYNELTKVKYVTEGMRKPAFLSGEQKKAIVDLLFKTNRKVTVKQLKEDYFKKIECFDSVEISGVEDRFNASLGTYHDLLKIIKDKDFLDNEENEDILEDIVLTLTLFEDREMIEERLKTYAHLFDDKVMKQLKRRRYTGWGRLSRKLINGIRDKQSGKTILDFLKSDGFANRNFMQLIHDDSLTFKEDIQKAQVSGQGDSLHEHIANLAGSPAIKKGILQTVKVVDELVKVMGRHKPENIVIEMARENQTTQKGQKNSRERMKRIEEGIKELGSQILKEHPVENTQLQNEKLYLYYLQNGRDMYVDQELDINRLSDYDVDHIVPQSFLKDDSIDNKVLTRSDKNRGKSDNVPSEEVVKKMKNYWRQLLNAKLITQRKFDNLTKAERGGLSELDKAGFIKRQLVETRQITKHVAQILDSRMNTKYDENDKLIREVKVITLKSKLVSDFRKDFQFYKVREINNYHHAHDAYLNAVVGTALIKKYPKLESEFVYGDYKVYDVRKMIAKSEQEIGKATAKYFFYSNIMNFFKTEITLANGEIRKRPLIETNGETGEIVWDKGRDFATVRKVLSMPQVNIVKKTEVQTGGFSKESILPKRNSDKLIARKKDWDPKKYGGFESPTVAYSVLVVAKVEKGKSKKLKSVKELLGITIMERSSFEKNPIDFLEAKGYKEVKKDLIIKLPKYSLFELENGRKRMLASAGELQKGNELALPSKYVNFLYLASHYEKLKGSPEDNEQKQLFVEQHKHYLDEIIEQISEFSKRVILADANLDKVLSAYNKHRDKPIREQAENIIHLFTLTNLGAPAAFKYFDTTIDRKQYRSTKEVLDATLIHQSITGLYETRIDLSQLGGD

SEQ ID NO: 101 - protein, 1368 aa, Streptococcus pyogenes
MDKKYSIGLAIGTNSVGWAVITDEYKVPSKKFKVLGNTDRHSIKKNLIGALLFDSGETAEATRLKRTARRRYTRRKNRICYLQEIFSNEMAKVDDSFFHRLEESFLVEEDKKHERHPIFGNIVDEVAYHEKYPTIYHLRKKLVDSTDKADLRLIYLALAHMIKFRGHFLIEGDLNPDNSDVDKLFIQLVQTYNQLFEENPINASGVDAKAILSARLSKSRRLENLIAQLPGEKKNGLFGNLIALSLGLTPNFKSNFDLAEDAKLQLSKDTYDDDLDNLLAQIGDQYADLFLAAKNLSDAILLSDILRVNTEITKAPLSASMIKRYDEHHQDLTLLKALVRQQLPEKYKEIFFDQSKNGYAGYIDGGASQEEFYKFIKPILEKMDGTEELLVKLNREDLLRKQRTFDNGSIPHQIHLGELHAILRRQEDFYPFLKDNREKIEKILTFRIPYYVGPLARGNSRFAWMTRKSEETITPWNFEEVVDKGASAQSFIERMTNFDKNLPNEKVLPKHSLLYEYFTVYNELTKVKYVTEGMRKPAFLSGEQKKAIVDLLFKTNRKVTVKQLKEDYFKKIECFDSVEISGVEDRFNASLGTYHDLLKIIKDKDFLDNEENEDILEDIVLTLTLFEDREMIEERLKTYAHLFDDKVMKQLKRRRYTGWGRLSRKLINGIRDKQSGKTILDFLKSDGFANRNFMQLIHDDSLTFKEDIQKAQVSGQGDSLHEHIANLAGSPAIKKGILQTVKVVDELVKVMGRHKPENIVIEMARENQTTQKGQKNSRERMKRIEEGIKELGSQILKEHPVENTQLQNEKLYLYYLQNGRDMYVDQELDINRLSDYDVDHIVPQSFLKDDSIDNKVLTRSDKNRGKSDNVPSEEVVKKMKNYWRQLLNAKLITQRKFDNLTKAERGGLSELDKAGFIKRQLVETRQITKHVAQILDSRMNTKYDENDKLIREVKVITLKSKLVSDFRKDFQFYKVREINNYHHAHDAYLNAVVGTALIKKYPKLESEFVYGDYKVYDVRKMIAKSEQEIGKATAKYFFYSNIMNFFKTEITLANGEIRKRPLIETNGETGEIVWDKGRDFATVRKVLSMPQVNIVKKTEVQTGGFSKESILPKRNSDKLIARKKDWDPKKYGGFVSPTVAYSVLVVAKVEKGKSKKLKSVKELLGITIMERSSFEKNPIDFLEAKGYKEVKKDLIIKLPKYSLFELENGRKRMLASAGELQKGNELALPSKYVNFLYLASHYEKLKGSPEDNEQKQLFVEQHKHYLDEIIEQISEFSKRVILADANLDKVLSAYNKHRDKPIREQAENIIHLFTLTNLGAPAAFKYFDTTIDRKQYRSTKEVLDATLIHQSITGLYETRIDLSQLGGD

SEQ ID NO: 102 - protein, 1368 aa, Streptococcus pyogenes
MDKKYSIGLAIGTNSVGWAVITDEYKVPSKKFKVLGNTDRHSIKKNLIGALLFDSGETAEATRLKRTARRRYTRRKNRICYLQEIFSNEMAKVDDSFFHRLEESFLVEEDKKHERHPIFGNIVDEVAYHEKYPTIYHLRKKLVDSTDKADLRLIYLALAHMIKFRGHFLIEGDLNPDNSDVDKLFIQLVQTYNQLFEENPINASGVDAKAILSARLSKSRRLENLIAQLPGEKKNGLFGNLIALSLGLTPNFKSNFDLAEDAKLQLSKDTYDDDLDNLLAQIGDQYADLFLAAKNLSDAILLSDILRVNTEITKAPLSASMIKRYDEHHQDLTLLKALVRQQLPEKYKEIFFDQSKNGYAGYIDGGASQEEFYKFIKPILEKMDGTEELLVKLNREDLLRKQRTFDNGSIPHQIHLGELHAILRRQEDFYPFLKDNREKIEKILTFRIPYYVGPLARGNSRFAWMTRKSEETITPWNFEEVVDKGASAQSFIERMTNFDKNLPNEKVLPKHSLLYEYFTVYNELTKVKYVTEGMRKPAFLSGEQKKAIVDLLFKTNRKVTVKQLKEDYFKKIECFDSVEISGVEDRFNASLGTYHDLLKIIKDKDFLDNEENEDILEDIVLTLTLFEDREMIEERLKTYAHLFDDKVMKQLKRRRYTGWGRLSRKLINGIRDKQSGKTILDFLKSDGFANRNFMQLIHDDSLTFKEDIQKAQVSGQGDSLHEHIANLAGSPAIKKGILQTVKVVDELVKVMGRHKPENIVIEMARENQTTQKGQKNSRERMKRIEEGIKELGSQILKEHPVENTQLQNEKLYLYYLQNGRDMYVDQELDINRLSDYDVDHIVPQSFLKDDSIDNKVLTRSDKNRGKSDNVPSEEVVKKMKNYWRQLLNAKLITQRKFDNLTKAERGGLSELDKAGFIKRQLVETRQITKHVAQILDSRMNTKYDENDKLIREVKVITLKSKLVSDFRKDFQFYKVREINNYHHAHDAYLNAVVGTALIKKYPKLESEFVYGDYKVYDVRKMIAKSEQEIGKATAKYFFYSNIMNFFKTEITLANGEIRKRPLIETNGETGEIVWDKGRDFATVRKVLSMPQVNIVKKTEVQTGGFSKESILPKRNSDKLIARKKDWDPKKYGGFVSPTVAYSVLVVAKVEKGKSKKLKSVKELLGITIMERSSFEKNPIDFLEAKGYKEVKKDLIIKLPKYSLFELENGRKRMLASARELQKGNELALPSKYVNFLYLASHYEKLKGSPEDNEQKQLFVEQHKHYLDEIIEQISEFSKRVILADANLDKVLSAYNKHRDKPIREQAENIIHLFTLTNLGAPAAFKYFDTTIDRKEYRSTKEVLDATLIHQSITGLYETRIDLSQLGGD

SEQ ID NO: 103 - protein, 1359 aa, Artificial Sequence
  Description of Artificial Sequence: Synthetic polypeptide
MDKKYSIGLDIGTNSVGWAVITDDYKVPSKKFKVLGNTDRHSIKKNLIGALLFGSGETAEATRLKRTARRRYTRRKNRICYLQEIFSNEMAKVDDSFFHRLEESFLVEEDKKHERHPIFGNIVDEVAYHEKYPTIYHLRKKLADSTDKADLRLIYLALAHMIKFRGHFLIEGDLNPDNSDVDKLFIQLVQIYNQLFEENPINASRVDAKAILSARLSKSRRLENLIAQLPGEKRNGLFGNLIALSLGLTPNFKSNFDLAEDAKLQLSKDTYDDDLDNLLAQIGDQYADLFLAAKNLSDAILLSDILRVNSEITKAPLSASMIKRYDEHHQDLTLLKALVRQQLPEKYKEIFFDQSKNGYAGYIDGGASQEEFYKFIKPILEKMDGTEELLVKLNREDLLRKQRTFDNGSIPHQIHLGELHAILRRQEDFYPFLKDNREKIEKILTFRIPYYVGPLARGNSRFAWMTRKSEETITPWNFEEVVDKGASAQSFIERMTNFDKNLPNEKVLPKHSLLYEYFTVYNELTKVKYVTEGMRKPAFLSGEQKKAIVDLLFKTNRKVTVKQLKEDYFKKIECFDSVEISGVEDRFNASLGAYHDLLKIIKDKDFLDNEENEDILEDIVLTLTLFEDRGMIEERLKTYAHLFDDKVMKQLKRRRYTGWGRLSRKLINGIRDKQSGKTILDFLKSDGFANRNFMQLIHDDSLTFKEDIQKAQVSGQGHSLHEQIANLAGSPAIKKGILQTVKIVDELVKVMGHKPENIVIEMARENQTTQKGQKNSRERMKRIEEGIKELGSQILKEHPVENTQLQNEKLYLYYLQNGRDMYVDQELDINRLSDYDVDHIVPQSFIKDDSIDNKVLTRSDKNRGKSDNVPSEEVVKKMKNYWRQLLNAKLITQRKFDNLTKAERGGLSELDKAGFIKRQLVETRQITKHVAQILDSRMNTKYDENDKLIREVKVITLKSKLVSDFRKDFQFYKVREINNYHHAHDAYLNAVVGTALIKKYPKLESEFVYGDYKVYDVRKMIAKSEQEIGKATAKYFFYSNIMNFFKTEITLANGEIRKRPLIETNGETGEIVWDKGRDFATVRKVLSMPQVNIVKKTEIQTVGQNGGLFDDNPKSPLEVTPSKLVPLKKELNPKKYGGYQKPTTAYPVLLITDTKQLIPISVMNKKQFEQNPVKFLRDRGYQQVGKNDFIKLPKYTLVDIGDGIKRLWASSKEIHKGNQLVVSKKSQILLYHAHHLDSDLSNDYLQNHNQQFDVLFNEIISFSKKCKLGKEHIQKIENVYSNKKNSASIEELAESFIKLLGFTQLGATSPFNFLGVKLNQKQYKGKKDYILPCTEGTLIRQSITGLYETRVDLSKIGED

SEQ ID NO: 104 - protein, 29 aa, Unknown
  Description of Unknown: nuclear localization sequence
PKKKRKVEGADKRTADGSEFESPKKKRKV

SEQ ID NO: 105 - protein, 23 aa, Unknown
  Description of Unknown: nuclear localization sequence
RKSGKIAAIVVKRPRKPKKKRKV

SEQ ID NO: 106 - protein, 4 aa, Artificial Sequence
  Description of Artificial Sequence: Synthetic peptide
GGGS

SEQ ID NO: 107 - protein, 5 aa, Artificial Sequence
  Description of Artificial Sequence: Synthetic peptide
GGGGS

SEQ ID NO: 108 - protein, 5 aa, Artificial Sequence
  Description of Artificial Sequence: Synthetic peptide
EAAAK

SEQ ID NO: 109 - protein, 6 aa, Artificial Sequence
  Description of Artificial Sequence: Synthetic peptide
GGSGGS

SEQ ID NO: 110 - protein, 20 aa, Artificial Sequence
  Description of Artificial Sequence: Synthetic peptide
GSSGSETPGTSESATPESSG

SEQ ID NO: 111 - DNA, 18 bp, Artificial Sequence
  Description of Artificial Sequence: Synthetic oligonucleotide
ggaggctctggaggaagc

SEQ ID NO: 112 - DNA, 60 bp, Artificial Sequence
  Description of Artificial Sequence: Synthetic oligonucleotide
ggctcttctggatctgaaacacctggcacaagcgagagcgccacccctgagagctctggc

SEQ ID NO: 113 - protein, 17 aa, Unknown
  Description of Unknown: nuclear localization signal sequence
MAPKKKRKVGIHGVPAA

SEQ ID NO: 114 - DNA, 51 bp, Unknown
  Description of Unknown: nuclear localization signal sequence
atggccccaaagaagaagcggaaggtcggtatccacggagtcccagcagcc

SEQ ID NO: 115 - protein, 167 aa, Unknown
  Description of Unknown: TadA sequence
MSEVEFSHEYWMRHALTLAKRAWDEREVPVGAVLVHNNRVIGEGWNRPIGRHDPTAHAEIMALRQGGLVMQNYRLIDATLYVTLEPCVMCAGAMIHSRIGRVVFGARDAKTGAAGSLMDVLHHPGMNHRVEITEGILADECAALLSDFFRMRRQEIKAQKKAQSSTD

SEQ ID NO: 116 - protein, 178 aa, Escherichia coli
MRRAFITGVFFLSEVEFSHEYWMRHALTLAKRAWDEREVPVGAVLVHNNRVIGEGWNRPIGRHDPTAHAEIMALRQGGLVMQNYRLIDATLYVTLEPCVMCAGAMIHSRIGRVVFGARDAKTGAAGSLMDVLHHPGMNHRVEITEGILADECAALLSDFFRMRRQEIKAQKKAQSSTD

SEQ ID NO: 117 - protein, 208 aa, Petromyzon marinus
MTDAEYVRIHEKLDIYTFKKQFFNNKKSVSHRCYVLFELKRRGERRACFWGYAVNKPQSGTERGIHAEIFSIRKVEEYLRDNPGQFTINWYSSWSPCADCAEKILEWYNQELRGNGHTLKIWACKLYYEKNARNQIGLWNLRDNGVGLNVMVSEHYQCCRKIFIQSSHNQLNENRWLEKTLKRAEKRRSELSIMIQVKILHTTKSPAV

SEQ ID NO: 118 - DNA, 766 bp, Petromyzon marinus
tgacacgacacagccgtgtatatgaggaagggtagctggatggggggggggggaatacgttcagagaggacattagcgagcgtcttgttggtggccttgagtctagacacctgcagacatgaccgacgctgagtacgtgagaatccatgagaagttggacatctacacgtttaagaaacagtttttcaacaacaaaaaatccgtgtcgcatagatgctacgttctctttgaattaaaacgacggggtgaacgtagagcgtgtttttggggctatgctgtgaataaaccacagagcgggacagaacgtggaattcacgccgaaatctttagcattagaaaagtcgaagaatacctgcgcgacaaccccggacaattcacgataaattggtactcatcctggagtccttgtgcagattgcgctgaaaagatcttagaatggtataaccaggagctgcgggggaacggccacactttgaaaatctgggcttgcaaactctattacgagaaaaatgcgaggaatcaaattgggctgtggaacctcagagataacggggttgggttgaatgtaatggtaagtgaacactaccaatgttgcaggaaaatattcatccaatcgtcgcacaatcaattgaatgagaatagatggcttgagaagactttgaagcgagctgaaaaacgacggagcgagttgtccattatgattcaggtaaaaatactccacaccactaagagtcctgctgtttaagaggctatgcggatggttttc

SEQ ID NO: 119 - protein, 145 aa, Homo sapiens
MDSLLMNRRKFLYQFKNVRWAKGRRETYLCYVVKRRDSATSFSLDFGYLRNKNGCHVELLFLRYISDWDLDPGRCYRVTWFTSWSPCYDCARHVADFLRGNPNLSLRIFTARLYFCEDRKAEPEGLRRLHRAGVQIAIMTFKAPV

SEQ ID NO: 120 - DNA, 10681 bp, Homo sapiens
agagaaccatcattaattgaagtgagatttttctggcctgagacttgcagggaggcaagaagacactctggacaccactatggacaggtaaagaggcagtcttctcgtgggtgattgcactggccttcctctcagagcaaatctgagtaatgagactggtagctatccctttctctcatgtaactgtctgactgataagatcagcttgatcaatatgcatatatattttttgatctgtctccttttcttctattcagatcttatacgctgtcagcccaattctttctgtttcagacttctcttgatttccctctttttcatgtggcaaaagaagtagtgcgtacaatgtactgattcgtcctgagatttgtaccatggttgaaactaatttatggtaataatattaacatagcaaatctttagagactcaaatcatgaaaaggtaatagcagtactgtactaaaaacggtagtgctaattttcgtaataattttgtaaatattcaacagtaaaacaacttgaagacacactttcctagggaggcgttactgaaataatttagctatagtaagaaaatttgtaattttagaaatgccaagcattctaaattaattgcttgaaagtcactatgattgtgtccattataaggagacaaattcattcaagcaagttatttaatgttaaaggcccaattgttaggcagttaatggcacttttactattaactaatctttccatttgttcagacgtagcttaacttacctcttaggtgtgaatttggttaaggtcctcataatgtctttatgtgcagtttttgataggttattgtcatagaacttattctattcctacatttatgattactatggatgtatgagaataacacctaatccttatactttacctcaatttaactcctttataaagaacttacattacagaataaagattttttaaaaatatatttttttgtagagacagggtcttagcccagccgaggctggtctctaagtcctggcccaagcgatcctcctgcctgggcctcctaaagtgctggaattatagacatgagccatcacatccaatatacagaataaagatttttaatggaggatttaatgttcttcagaaaattttcttgaggtcagacaatgtcaaatgtctcctcagtttacactgagattttgaaaacaagtctgagctataggtccttgtgaagggtccattggaaatacttgttcaaagtaaaatggaaagcaaaggtaaaatcagcagttgaaattcagagaaagacagaaaaggagaaaagatgaaattcaacaggacagaagggaaatatattatcattaaggaggacagtatctgtagagctcattagtgatggcaaaatgacttggtcaggattatttttaacccgcttgtttctggtttgcacggctggggatgcagctagggttctgcctcagggagcacagctgtccagagcagctgtcagcctgcaagcctgaaacactccctcggtaaagtccttcctactcaggacagaaatgacgagaacagggagctggaaacaggcccctaaccagagaagggaagtaatggatcaacaaagttaactagcaggtcaggatcacgcaattcatttcactctgactggtaacatgtgacagaaacagtgtaggcttattgtattttcatgtagagtaggacccaaaaatccacccaaagtcctttatctatgccacatccttcttatctatacttccaggacactttttcttccttatgataaggctctctctctctccacacacacacacacacacacacacacacacacacacacacacacaaacacacaccccgccaaccaaggtgcatgtaaaaagatgtagattcctctgcctttctcatctacacagcccaggagggtaagttaatataagagggatttattggtaagagatgatgcttaatctgtttaacactgggcctcaaagagagaatttcttttcttctgtacttattaagcacctattatgtgttgagcttatatatacaaagggttattatatgctaatatagtaatagtaatggtggttggtactatggtaattaccataaaaattattatccttttaaaataaagctaattattattggatcttttttagtattcattttatgttttttatgtttttgattttttaaaagacaatctcaccctgttacccaggctggagtgcagtggtgcaatcatagctttctgcagtcttgaactcctgggctcaagcaatcctcctgccttggcctcccaaagtgttgggatacagtcatgagccactgcatctggcctaggatccatttagattaaaatatgcattttaaattttaaaataatatggctaatttttaccttatgtaatgtgtatactggcaataaatctagtttgctgcctaaagtttaaagtgctttccagtaagcttcatgtacgtgaggggagacatttaaagtgaaacagacagccaggtgtggtggctcacgcctgtaatcccagcactctgggaggctgaggtgggtggatcgcttgagccctggagttcaagaccagcctgagcaacatggcaaaacgctgtttctataacaaaaattagccgggcatggtggcatgtgcctgtggtcccagctactagggggctgaggcaggagaatcgttggagcccaggaggtcaaggctgcactgagcagtgcttgcgccactgcactccagcctgggtgacaggaccagaccttgcctcaaaaaaataagaagaaaaattaaaaataaatggaaacaactacaaagagctgttgtcctagatgagctacttagttaggctgatattttggtatttaacttttaaagtcagggtctgtcacctgcactacattattaaaatatcaattctcaatgtatatccacacaaagactggtacgtgaatgttcatagtacctttattcacaaaaccccaaagtagagactatccaaatatccatcaacaagtgaacaaataaacaaaatgtgctatatccatgcaatggaataccaccctgcagtacaaagaagctacttggggatgaatcccaaagtcatgacgctaaatgaaagagtcagacatgaaggaggagataatgtatgccatacgaaattctagaaaatgaaagtaacttatagttacagaaagcaaatcagggcaggcatagaggctcacacctgtaatcccagcactttgagaggccacgtgggaagattgctagaactcaggagttcaagaccagcctgggcaacacagtgaaactccattctccacaaaaatgggaaaaaaagaaagcaaatcagtggttgtcctgtggggaggggaaggactgcaaagagggaagaagctctggtggggtgagggtggtgattcaggttctgtatcctgactgtggtagcagtttggggtgtttacatccaaaaatattcgtagaattatgcatcttaaatgggtggagtttactgtatgtaaattatacctcaatgtaagaaaaaataatgtgtaagaaaactttcaattctcttgccagcaaacgttattcaaattcctgagccctttacttcgcaaattctctgcacttctgccccgtaccattaggtgacagcactagctccacaaattggataaatgcatttctggaaaagactagggacaaaatccaggcatcacttgtgctttcatatcaaccatgctgtacagcttgtgttgctgtctgcagctgcaatggggactcttgatttctttaaggaaacttgggttaccagagtatttccacaaatgctattcaaattagtgcttatgatatgcaagacactgtgctaggagccagaaaacaaagaggaggagaaatcagtcattatgtgggaacaacatagcaagatatttagatcattttgactagttaaaaaagcagcagagtacaaaatcacacatgcaatcagtataatccaaatcatgtaaatatgtgcctgtagaaagactagaggaataaacacaagaatcttaacagtcattgtcattagacactaagtctaattattattattagacactatgatatttgagatttaaaaaatctttaatattttaaaatttagagctcttctatttttccatagtattcaagtttgacaatgatcaagtattactctttctttttttttttttttttttttttttgagatggagttttggtcttgttgcccatgctggagtggaatggcatgaccatagctcactgcaacctccacctcctgggttcaagcaaagctgtcgcctcagcctcccgggtagatgggattacaggcgcccaccaccacactcggctaatgtttgtatttttagtagagatggggtttcaccatgttggccaggctggtctcaaactcctgacctcagaggatccacctgcctcagcctcccaaagtgctgggattacagatgtaggccactgcgcccggccaagtattgctcttatacattaaaaaacaggtgtgagccactgcgcccagccaggtattgctcttatacattaaaaaataggccggtgcagtggctcacgcctgtaatcccagcactttgggaagccaaggcgggcagaacacccgaggtcaggagtccaaggccagcctggccaagatggtgaaaccccgtctctattaaaaatacaaacattacctgggcatgatggtgggcgcctgtaatcccagctactcaggaggctgaggcaggaggatccgcggagcctggcagatctgcctgagcctgggaggttgaggctacagtaagccaagatcatgccagtatacttcagcctgggcgacaaagtgagaccgtaacaaaaaaaaaaaaatttaaaaaaagaaatttagatcaagatccaactgtaaaaagtggcctaaacaccacattaaagagtttggagtttattctgcaggcagaagagaaccatcagggggtcttcagcatgggaatggcatggtgcacctggtttttgtgagatcatggtggtgacagtgtggggaatgttattttggagggactggaggcagacagaccggttaaaaggccagcacaacagataaggaggaagaagatgagggcttggaccgaagcagagaagagcaaacagggaaggtacaaattcaagaaatattggggggtttgaatcaacacatttagatgattaattaaatatgaggactgaggaataagaaatgagtcaaggatggttccaggctgctaggctgcttacctgaggtggcaaagtcgggaggagtggcagtttaggacagggggcagttgaggaatattgttttgatcattttgagtttgaggtacaagttggacacttaggtaaagactggaggggaaatctgaatatacaattatgggactgaggaacaagtttattttattttttgtttcgttttcttgttgaagaacaaatttaattgtaatcccaagtcatcagcatctagaagacagtggcaggaggtgactgtcttgtgggtaagggtttggggtccttgatgagtatctctcaattggccttaaatataagcaggaaaaggagtttatgatggattccaggctcagcagggctcaggagggctcaggcagccagcagaggaagtcagagcatcttctttggtttagcccaagtaatgacttccttaaaaagctgaaggaaaatccagagtgaccagattataaactgtactcttgcattttctctccctcctctcacccacagcctcttgatgaaccggaggaagtttctttaccaattcaaaaatgtccgctgggctaagggtcggcgtgagacctacctgtgctacgtagtgaagaggcgtgacagtgctacatccttttcactggactttggttatcttcgcaataaggtatcaattaaagtcggctttgcaagcagtttaatggtcaactgtgagtgcttttagagccacctgctgatggtattacttccatccttttttggcatttgtgtctctatcacattcctcaaatccttttttttatttctttttccatgtccatgcacccatattagacatggcccaaaatatgtgatttaattcctccccagtaatgctgggcaccctaataccactccttccttcagtgccaagaacaactgctcccaaactgtttaccagctttcctcagcatctgaattgcctttgagattaattaagctaaaagcatttttatatgggagaatattatcagcttgtccaagcaaaaattttaaatgtgaaaaacaaattgtgtcttaagcatttttgaaaattaaggaagaagaatttgggaaaaaattaacggtggctcaattctgtcttccaaatgatttcttttccctcctactcacatgggtcgtaggccagtgaatacattcaacatggtgatccccagaaaactcagagaagcctcggctgatgattaattaaattgatctttcggctacccgagagaattacatttccaagagacttcttcaccaaaatccagatgggtttacataaacttctgcccacgggtatctcctctctcctaacacgctgtgacgtctgggcttggtggaatctcagggaagcatccgtggggtggaaggtcatcgtctggctcgttgtttgatggttatattaccatgcaattttctttgcctacatttgtattgaatacatcccaatctccttcctattcggtgacatgacacattctatttcagaaggctttgattttatcaagcactttcatttacttctcatggcagtgcctattacttctcttacaatacccatctgtctgctttaccaaaatctatttccccttttcagatcctcccaaatggtcctcataaactgtcctgcctccacctagtggtccaggtatatttccacaatgttacatcaacaggcacttctagccattttccttctcaaaaggtgcaaaaagcaacttcataaacacaaattaaatcttcggtgaggtagtgtgatgctgcttcctcccaactcagcgcacttcgtcttcctcattccacaaaaacccatagccttccttcactctgcaggactagtgctgccaagggttcagctctacctactggtgtgctcttttgagcaagttgcttagcctctctgtaacacaaggacaatagctgcaagcatccccaaagatcattgcaggagacaatgactaaggctaccagagccgcaataaaagtcagtgaattttagcgtggtcctctctgtctctccagaacggctgccacgtggaattgctcttcctccgctacatctcggactgggacctagaccctggccgctgctaccgcgtcacctggttcacctcctggagcccctgctacgactgtgcccgacatgtggccgactttctgcgagggaaccccaacctcagtctgaggatcttcaccgcgcgcctctacttctgtgaggaccgcaaggctgagcccgaggggctgcggcggctgcaccgcgccggggtgcaaatagccatcatgaccttcaaaggtgcgaaagggccttccgcgcaggcgcagtgcagcagcccgcattcgggattgcgatgcggaatgaatgagttagtggggaagctcgaggggaagaagtgggcggggattctggttcacctctggagccgaaattaaagattagaagcagagaaaagagtgaatggctcagagacaaggccccgaggaaatgagaaaatggggccagggttgcttctttcccctcgatttggaacctgaactgtcttctacccccatatccccgcctttttttcctttttttttttttgaagattatttttactgctggaatacttttgtagaaaaccacgaaagaactttcaaagcctgggaagggctgcatgaaaattcagttcgtctctccagacagcttcggcgcatccttttggtaaggggcttcctcgctttttaaattttctttctttctctacagtcttttttggagtttcgtatatttcttatattttcttattgttcaatcactctcagttttcatctgatgaaaactttatttctcctccacatcagctttttcttctgctgtttcaccattcagagccctctgctaaggttccttttccctcccttttctttcttttgttgtttcacatctttaaatttctgtctctccccagggttgcgtttccttcctggtcagaattcttttctcctttttttttttttttttttttttttttaaacaaacaaacaaaaaacccaaaaaaactctttcccaatttactttcttccaacatgttacaaagccatccactcagtttagaagactctccggccccaccgacccccaacctcgttttgaagccattcactcaatttgcttctctctttctctacagcccctgtatgaggttgatgacttacgagacgcatttcgtactttgggactttgatagcaacttccaggaatgtcacacacgatgaaatatctctgctgaagacagtggataaaaaacagtccttcaagtcttctctgtttttattcttcaactctcactttcttagagtttacagaaaaaatatttatatacgactctttaaaaagatctatgtcttgaaaatagagaaggaacacaggtctggccagggacgtgctgcaattggtgcagttttgaatgcaacattgtcccctactgggaataacagaactgcaggacctgggagcatcctaaagtgtcaacgtttttctatgacttttaggtaggatgagagcagaaggtagatcctaaaaagcatggtgagaggatcaaatgtttttatatcaacatcctttattatttgattcatttgagttaacagtggtgttagtgatagatttttctattcttttcccttgacgtttactttcaagtaacacaaactcttccatcaggccatgatctataggacctcctaatgagagtatctgggtgattgtgaccccaaaccatctctccaaagcattaatatccaatcatgcgctgtatgttttaatcagcagaagcatgtttttatgtttgtacaaaagaagattgttatgggtggggatggaggtatagaccatgcatggtcaccttcaagctactttaataaaggatcttaaaatgggcaggaggactgtgaacaagacaccctaataatgggttgatgtctgaagtagcaaatcttctggaaacgcaaactcttttaaggaagtccctaatttagaaacacccacaaacttcacatatcataattagcaaacaattggaaggaagttgcttgaatgttggggagaggaaaatctattggctctcgtgggtctcttcatctcagaaatgccaatcaggtcaaggtttgctacattttgtatgtgtgtgatgcttctcccaaaggtatattaactatataagagagttgtgacaaaacagaatgataaagctgcgaaccgtggcacacgctcatagttctagctgcttgggaggttgaggagggaggatggcttgaacacaggtgttcaaggccagcctgggcaacataacaagatcctgtctctcaaaaaaaaaaaaaaaaaaaagaaagagagagggccgggcgtggtggctcacgcctgtaatcccagcactttgggaggccgagccgggcggatcacctgtggtcaggagtttgagaccagcctggccaacatggcaaaaccccgtctgtactcaaaatgcaaaaattagccaggcgtggtagcaggcacctgtaatcccagctacttgggaggctgaggcaggagaatcgcttgaacccaggaggtggaggttgcagtaagctgagatcgtgccgttgcactccagcctgggcgacaagagcaagactctgtctcagaaaaaaaaaaaaaaaagagagagagagagaaagagaacaatatttgggagagaaggatggggaagcattgcaaggaaattgtgctttatccaacaaaatgtaaggagccaataagggatccctatttgtctcttttggtgtctatttgtccctaacaactgtctttgacagtgagaaaaatattcagaataaccatatccctgtgccgttattacctagcaacccttgcaatgaagatgagcagatccacaggaaaacttgaatgcacaactgtcttattttaatcttattgtacataagtttgtaaaagagttaaaaattgttacttcatgtattcatttatattttatattattttgcgtctaatgattttttattaacatgatttccttttctgatatattgaaatggagtctcaaagcttcataaatttataactttagaaatgattctaataacaacgtatgtaattgtaacattgcagtaatggtgctacgaagccatttctcttgatttttagtaaacttttatgacagcaaatttgcttctggctcactttcaatcagttaaataaatgataaataattttggaagctgtgaagataaaataccaaataaaataatataaaagtgatttatatgaagttaaaataaaaaatcagtatgatggaataaacttg

SEQ ID NO: 121 - protein, 198 aa, Homo sapiens [sequence omitted]

SEQ ID NO: 122 - protein, 198 aa, Mus musculus
MDSLLMKQKKFLYHFKNVRWAKGRHETYLCYVVKRRDSATSCSLDFGHLRNKSGCHVELLFLRYISDWDLDPGRCYRVTWFTSWSPCYDCARHVAEFLRWNPNLSLRIFTARLYFCEDRKAEPEGLRRLHRAGVQIGIMTFKDYFYCWNTFVENRERTFKAWEGLHENSVRLTRQLRRILLPLYEVDDLRDAFRMLGF

SEQ ID NO: 123 - protein, 198 aa, Canis lupus
MDSLLMKQRKFLYHFKNVRWAKGRHETYLCYVVKRRDSATSFSLDFGHLRNKSGCHVELLFLRYISDWDLDPGRCYRVTWFTSWSPCYDCARHVADFLRGYPNLSLRIFAARLYFCEDRKAEPEGLRRLHRAGVQIAIMTFKDYFYCWNTFVENREKTFKAWEGLHENSVRLSRQLRRILLPLYEVDDLRDAFRTLGL

SEQ ID NO: 124 - protein, 199 aa, Bos taurus
MDSLLKKQRQFLYQFKNVRWAKGRHETYLCYVVKRRDSPTSFSLDFGHLRNKAGCHVELLFLRYISDWDLDPGRCYRVTWFTSWSPCYDCARHVADFLRGYPNLSLRIFTARLYFCDKERKAEPEGLRRLHRAGVQIAIMTFKDYFYCWNTFVENHERTFKAWEGLHENSVRLSRQLRRILLPLYEVDDLRDAFRTLGL

SEQ ID NO: 125 - protein, 239 aa, Rattus norvegicus
MAVGSKPKAALVGPHWERERIWCFLCSTGLGTQQTGQTSRWLRPAATQDPVSPPRSLLMKQRKFLYHFKNVRWAKGRHETYLCYVVKRRDSATSFSLDFGYLRNKSGCHVELLFLRYISDWDLDPGRCYRVTWFTSWSPCYDCARHVADFLRGNPNLSLRIFTARLTGWGALPAGLMSPARPSDYFYCWNTFVENHERTFKAWEGLHENSVRLSRRLRRILLPLYEVDDLRDAFRTLGL

SEQ ID NO: 126 - protein, 194 aa, Rhinopithecus roxellana
MKPQIRDHRPNPMEAMYPHIFYFHFENLEKAYGRNETWLCFTVEIIKQYLPVPWKKGVFRNQVDPETHCHAEKCFLSWFCNNTLSPKKNYQVTWYTSWSPCPECAGEVAEFLAEHSNVKLTIYTARLYYFWDTDYQEGLRSLSEEGASVEIMDYEDFQYCWENFVYDDGEPFKRWKGLKYNFQSLTRRLREILQ

SEQ ID NO: 127 - protein, 192 aa, Alligator mississippiensis
MADSSEKMRGQYISRDTFEKNYKPIDGTKEAHLLCEIKWGKYGKPWLHWCQNQRMNIHAEDYFMNNIFKAKKHPVHCYVTWYLSWSPCADCASKIVKFLEERPYLKLTIYVAQLYYHTEEENRKGLRLLRSKKVIIRVMDISDYNYCWKVFVSNQNGNEDYWPLQFDPWVKENYSRLLDIFWESKCRSPNPW

SEQ ID NO: 128 - protein, 229 aa, Rattus norvegicus [sequence omitted]

SEQ ID NO: 129 - protein, 229 aa, Mesocricetus auratus
MSSETGPVVVDPTLRRRIEPHEFDAFFDQGELRKETCLLYEIRWGGRHNIWRHTGQNTSRHVEINFIEKFTSERYFYPSTRCSIVWFLSWSPCGECSKAITEFLSGHPNVTLFIYAARLYHHTDQRNRQGLRDLISRGVTIRIMTEQEYCYCWRNFVNYPPSNEVYWPRYPNLWMRLYALELYCIHLGLPPCLKIKRRHQYPLTFFRLNLQSCHYQRIPPHILWATGFI

SEQ ID NO: 130 - protein, 236 aa, Pongo pygmaeus
MTSEKGPSTGDPTLRRRIESWEFDVFYDPRELRKETCLLYEIKWGMSRKIWRSSGKNTTNHVEVNFIKKFTSERRFHSSISCSITWFLSWSPCWECSQAIREFLSQHPGVTLVIYVARLFWHMDQRNRQGLRDLVNSGVTIQIMRASEYYHCWRNFVNYPPGDEAHWPQYPPLWMMLYALELHCIILSLPPCLKISRRWQNHLAFFRLHLQNCHYQTIPPHILLATGLIHPSVTWR

SEQ ID NO: 131 - protein, 238 aa, Pongo pygmaeus
MTSEKGPSTGDPTLRRRIESWEFDVFYDPRELRKETCLLYEIKWGMSRKIWRSSGKNTTNHVEVNFIKKFTSERRFHSSISCSITWFLSWSPCWECSQAIREFLSQHPGVTLVIYVARLFWAMDQRNRQGLRDLVNSGVTIQIMRASEYYHCWRNFVNYPPGDEAHWPQYPPLWMMLYALELHCIILSLPPCLKISRRWQNHLAFFRLHLQNCHYQTIPPHILLATGLIHPSVTWRLK

SEQ ID NO: 132 - protein, 236 aa, Oryctolagus cuniculus
MASEKGPSNKDYTLRRRIEPWEFEVFFDPQELRKEACLLYEIKWGASSKTWRSSGKNTTNHVEVNFLEKLTSEGRLGPSTCCSITWFLSWSPCWECSMAIREFLSQHPGVTLIIFVARLFQHMDRRNRQGLKDLVTSGVTVRVMSVSEYCYCWENFVNYPPGKAAQWPRYPPRWMLMYALELYCIILGLPPCLKISRRHQKQLTFFSLTPQYCHYKMIPPYILLATGLLQPSVPWR

SEQ ID NO: 133 - protein, 235 aa, Monodelphis domestica
MNSKTGPSVGDATLRRRIKPWEFVAFFNPQELRKETCLLYEIKWGNQNIWRHSNQNTSQHAEINFMEKFTAERHFNSSVRCSITWFLSWSPCWECSKAIRKFLDHYPNVTLAIFISRLYWHMDQQHRQGLKELVHSGVTIQIMSYSEYHYCWRNFVDYPQGEEDYWPKYPYLWIMLYVLELHCIILGLPPCLKISGSHSNQLALFSLDLQDCHYQKIPYNVLVATGLVQPFVTWR

SEQ ID NO: 134 - protein, 224 aa, Pongo pygmaeus
MAQKEEAAAATEAASQNGEDLENLDDPEKLKELIELPPFEIVTGERLPANFFKFQFRNVEYSSGRNKTFLCYVVEAQGKGGQVQASRGYLEDEHAAAHAEEAFFNTILPAFDPALRYNVTWYVSSSPCAACADRIIKTLSKTKNLRLLILVGRLFMWEELEIQDALKKLKEAGCKLRIMKPQDFEYVWQNFVEQEEGESKAFQPWEDIQENFLYYEEKLADILK

SEQ ID NO: 135 - protein, 224 aa, Bos taurus
MAQKEEAAAAAEPASQNGEEVENLEDPEKLKELIELPPFEIVTGERLPAHYFKFQFRNVEYSSGRNKTFLCYVVEAQSKGGQVQASRGYLEDEHATNHAEEAFFNSIMPTFDPALRYMVTWYVSSSPCAACADRIVKTLNKTKNLRLLILVGRLFMWEEPEIQAALRKLKEAGCRLRIMKPQDFEYIWQNFVEQEEGESKAFEPWEDIQENFLYYEEKLADILK

SEQ ID NO: 136 - protein, 280 aa, Sus scrofa
MDPQRLRQWPGPGPASRGGYGQRPRIRNPEEWFHELSPRTFSFHFRNLRFASGRNRSYICCQVEGKNCFFQGIFQNQVPPDPPCHAELCFLSWFQSWGLSPDEHYYVTWFISWSPCCECAAKVAQFLEENRNVSLSLSAARLYYFWKSESREGLRRLSDLGAQVGIMSFQDFQHCWNNFVHNLGMPFQPWKKLHKNYQRLVTELKQILREEPATYGSPQAQGKVRIGSTAAGLRHSHSHTRSEAHLRPNHSSRQHRILNPPREARARTCVLVDASWICYR

SEQ ID NO: 137 - protein, 440 aa, Mus musculus
MQPQRLGPRAGMGPFCLGCSHRKCYSPIRNLISQETFKFHFKNLGYAKGRKDTFLCYEVTRKDCDSPVSLHHGVFKNKDNIHAEICFLYWFHDKVLKVLSPREEFKITWYMSWSPCFECAEQIVRFLATHHNLSLDIFSSRLYNVQDPETQQNLCRLVQEGAQVAAMDLYEFKKCWKKFVDNGGRRFRPWKRLLTNFRYQDSKLQEILRPCYISVPSSSSSTLSNICLTKGLPETRFWVEGRRMDPLSEEEFYSQFYNQRVKHLCYYHRMKPYLCYQLEQFNGQAPLKGCLLSEKGKQHAEILFLDKIRSMELSQVTITCYLTWSPCPNCAWQLAAFKRDRPDLILHIYTSRLYFHWKRPFQKGLCSLWQSGILVDVMDLPQFTDCWTNFVNPKRPFWPWKGLEIISRRTQRRLRRIKESWGLQDLVNDFGNLQLGPPMS

SEQ ID NO: 138 - protein, 429 aa, Mus musculus
MGPFCLGCSHRKCYSPIRNLISQETFKFHFKNLGYAKGRKDTFLCYEVTRKDCDSPVSLHHGVFKNKDNIHAEICFLYWFHDKVLKVLSPREEFKITWYMSWSPCFECAEQIVRFLATHHNLSLDIFSSRLYNVQDPETQQNLCRLVQEGAQVAAMDLYEFKKCWKKFVDNGGRRFRPWKRLLTNFRYQDSKLQEILRPCYIPVPSSSSSTLSNICLTKGLPETRFCVEGRRMDPLSEEEFYSQFYNQRVKHLCYYHRMKPYLCYQLEQFNGQAPLKGCLLSEKGKQHAEILFLDKIRSMELSQVTITCYLTWSPCPNCAWQLAAFKRDRPDLILHIYTSRLYFHWKRPFQKGLCSLWQSGILVDVMDLPQFTDCWTNFVNPKRPFWPWKGLEIISRRTQRRLRRIKESWGLQDLVNDFGNLQLGPPMS

SEQ ID NO: 139 - protein, 430 aa, Rattus norvegicus
MGPFCLGCSHRKCYSPIRNLISQETFKFHFKNRLRYAIDRKDTFLCYEVTRKDCDSPVSLHHGVFKNKDNIHAEICFLYWFHDKVLKVLSPREEFKITWYMSWSPCFECAEQVLRFLATHHNLSLDIFSSRLYNIRDPENQQNLCRLVQEGAQVAAMDLYEFKKCWKKFVDNGGRRFRPWKKLLTNFRYQDSKLQEILRPCYIPVPSSSSSTLSNICLTKGLPETRFCVERRRVHLLSEEEFYSQFYNQRVKHLCYYHGVKPYLCYQLEQFNGQAPLKGCLLSEKGKQHAEILFLDKIRSMELSQVIITCYLTWSPCPNCAWQLAAFKRDRPDLILHIYTSRLYFHWKRPFQKGLCSLWQSGILVDVMDLPQFTDCWTNFVNPKRPFWPWKGLEIISRRTQRRLHRIKESWGLQDLVNDFGNLQLGPPMS

SEQ ID NO: 140 - protein, 199 aa, Homo sapiens
MEASPASGPRHLMDPHIFTSNFNNGIGRHKTYLCYEVERLDNGTSVKMDQHRGFLHNQAKNLLCGFYGRHAELRFLDLVPSLQLDPAQIYRVTWFISWSPCFSWGCAGEVRAFLQENTHVRLRIFAARIYDYDPLYKEALQMLRDAGAQVSIMTYDEFKHCWDTFVDHQGCPFQPWDGLDEHSQALSGRLRAILQNQGN

SEQ ID NO: 141 - protein, 373 aa, Homo sapiens
MKPHFRNTVERMYRDTFSYNFYNRPILSRRNTVWLCYEVKTKGPSRPRLDAKIFRGQVYSQPEHHAEMCFLSWFCGNQLPAYKCFQITWFVSWTPCPDCVAKLAEFLAEHPNVTLTISAARLYYYWERDYRRALCRLSQAGARVKIMDDEEFAYCWENFVYSEGQPFMPWYKFDDNYAFLHRTLKEILRNPMEAMYPHIFYFHFKNLRKAYGRNESWLCFTMEVVKHHSPVSWKRGVFRNQVDPETHCHAERCFLSWFCDDILSPNTNYEVTWYTSWSPCPECAGEVAEFLARHSNVNLTIFTARLYYFWDTDYQEGLRSLSQEGASVEIMGYKDFKYCWENFVYNDDEPFKPWKGLKYNFLFLDSKLQEILE

SEQ ID NO: 142 - protein, 370 aa, Macaca mulatta
MVEPMDPRTFVSNFNNRPILSGLNTVWLCCEVKTKDPSGPPLDAKIFQGKVYSKAKYHPEMRFLRWFHKWRQLHHDQEYKVTWYVSWSPCTRCANSVATFLAKDPKVTLTIFVARLYYFWKPDYQQALRILCQKRGGPHATMKIMNYNEFQDCWNKFVDGRGKPFKPRNNLPKHYTLLQATLGELLRHLMDPGTFTSNFNNKPWVSGQHETYLCYKVERLHNDTWVPLNQHRGFLRNQAPNIHGFPKGRHAELCFLDLIPFWKLDGQQYRVTCFTSWSPCFSCAQEMAKFISNNEHVSLCIFAARIYDDQGRYQEGLRALHRDGAKIAMMNYSEFEYCWDTFVDRQGRPFQPWDGLDEHSQALSGRLRAI

SEQ ID NO: 143 - protein, 384 aa, Pan troglodytes
MKPHFRNPVERMYQDTFSDNFYNRPILSHRNTVWLCYEVKTKGPSRPPLDAKIFRGQVYSKLKYHPEMRFFHWFSKWRKLHRDQEYEVTWYISWSPCTKCTRDVATFLAEDPKVTLTIFVARLYYFWDPDYQEALRSLCQKRDGPRATMKIMNYDEFQHCWSKFVYSQRELFEPWNNLPKYYILLHIMLGEILRHSMDPPTFTSNFNNELWVRGRHETYLCYEVERLHNDTWVLLNQRRGFLCNQAPHKHGFLEGRHAELCFLDVIPFWKLDLHQDYRVTCFTSWSPCFSCAQEMAKFISNNKHVSLCIFAARIYDDQGRCQEGLRTLAKAGAKISIMTYSEFKHCWDTFVDHQGCPFQPWDGLEEHSQALSGRLRAILQNQGN

SEQ ID NO: 144 - protein, 377 aa, Chlorocebus sabaeus
MNPQIRNMVEQMEPDIFVYYFNNRPILSGRNTVWLCYEVKTKDPSGPPLDANIFQGKLYPEAKDHPEMKFLHWFRKWRQLHRDQEYEVTWYVSWSPCTRCANSVATFLAEDPKVTLTIFVARLYYFWKPDYQQALRILCQERGGPHATMKIMNYNEFQHCWNEFVDGQGKPFKPRKNLPKHYTLLHATLGELLRHVMDPGTFTSNFNNKPWVSGQRETYLCYKVERSHNDTWVLLNQHRGFLRNQAPDRHGFPKGRHAELCFLDLIPFWKLDDQQYRVTCFTSWSPCFSCAQKMAKFISNNKHVSLCIFAARIYDDQGRCQEGLRTLHRDGAKIAVMNYSEFEYCWDTFVDRQGRPFQPWDGLDEHSQALSGRLRAI

SEQ ID NO: 145 - protein, 384 aa, Homo sapiens
MKPHFRNTVERMYRDTFSYNFYNRPILSRRNTVWLCYEVKTKGPSRPPLDAKIFRGQVYSELKYHPEMRFFHWFSKWRKLHRDQEYEVTWYISWSPCTKCTRDMATFLAEDPKVTLTIFVARLYYFWDPDYQEALRSLCQKRDGPRATMKIMNYDEFQHCWSKFVYSQRELFEPWNNLPKYYILLHIMLGEILRHSMDPPTFTFNFNNEPWVRGRHETYLCYEVERMHNDTWVLLNQRRGFLCNQAPHKHGFLEGRHAELCFLDVIPFWKLDLDQDYRVTCFTSWSPCFSCAQEMAKFISKNKHVSLCIFTARIYDDQGRCQEGLRTLAEAGAKISIMTYSEFKHCWDTFVDHQGCPFQPWDGLDEHSQDLSGRLRAILQNQEN

SEQ ID NO: 146 - protein, 382 aa, Homo sapiens
MNPQIRNPMERMYRDTFYDNFENEPILYGRSYTWLCYEVKIKRGRSNLLWDTGVFRGQVYFKPQYHAEMCFLSWFCGNQLPAYKCFQITWFVSWTPCPDCVAKLAEFLSEHPNVTLTISAARLYYYWERDYRRALCRLSQAGARVTIMDYEEFAYCWENFVYNEGQQFMPWYKFDENYAFLHRTLKEILRYLMDPDTFTFNFNNDPLVLRRRQTYLCYEVERLDNGTWVLMDQHMGFLCNEAKNLLCGFYGRHAELRFLDLVPSLQLDPAQIYRVTWFISWSPCFSWGCAGEVRAFLQENTHVRLRIFAARIYDYDPLYKEALQMLRDAGAQVSIMTYDEFEYCWDTFVYRQGCPFQPWDGLEEHSQALSGRLRAILQNQGN

SEQ ID NO: 147 - protein, 395 aa, Rattus norvegicus
MQPQGLGPNAGMGPVCLGCSHRRPYSPIRNPLKKLYQQTFYFHFKNVRYAWGRKNNFLCYEVNGMDCALPVPLRQGVFRKQGHIHAELCFIYWFHDKVLRVLSPMEEFKVTWYMSWSPCSKCAEQVARFLAAHRNLSLAIFSSRLYYYLRNPNYQQKLCRLIQEGVHVAAMDLPEFKKCWNKFVDNDGQPFRPWMRLRINFSFYDCKLQEIFSRMNLLREDVFYLQFNNSHRVKPVQNRYYRRKSYLCYQLERANGQEPLKGYLLYKKGEQHVEILFLEKMRSMELSQVRITCYLTWSPCPNCARQLAAFKKDHPDLILRIYTSRLYFWRKKFQKGLCTLWRSGIHVDVMDLPQFADCWTNFVNPQRPFRPWNELEKNSWRIQRRLRRIKESWGL

SEQ ID NO: 148 - protein, 226 aa, Bos taurus
DGWEVAFRSGTVLKAGVLGVSMTEGWAGSGHPGQGACVWTPGTRNTMNLLREVLFKQQFGNQPRVPAPYYRRKTYLCYQLKQRNDLTLDRGCFRNKKQRHAERFIDKINSLDLNPSQSYKIICYITWSPCPNCANELVNFITRNNHLKLEIFASRLYFHWIKSFKMGLQDLQNAGISVAVMTHTEFEDCWEQFVDNQSRPFQPWDKLEQYSASIRRRLQRILTAPI

SEQ ID NO: 149 - protein, 490 aa, Pan troglodytes
MNPQIRNPMEWMYQRTFYYNFENEPILYGRSYTWLCYEVKIRRGHSNLLWDTGVFRGQMYSQPEHHAEMCFLSWFCGNQLSAYKCFQITWFVSWTPCPDCVAKLAKFLAEHPNVTLTISAARLYYYWERDYRRALCRLSQAGARVKIMDDEEFAYCWENFVYNEGQPFMPWYKFDDNYAFLHRTLKEIIRHLMDPDTFTFNFNNDPLVLRRHQTYLCYEVERLDNGTWVLMDQHMGFLCNEAKNLLCGFYGRHAELRFLDLVPSLQLDPAQIYRVTWFISWSPCFSWGCAGQVRAFLQENTHVRLRIFAARIYDYDPLYKEALQMLRDAGAQVSIMTYDEFEYCWDTFVYRQGCPFQPWDGLEEHSQALSGRLRAILQVRASSLCMVPHRPPPPPQSPGPCLPLCSEPPLGSLLPTGRPAPSLPFLLTASFSFPPPASLPPLPSLSLSPGHLPVPSFHSLTSCSIQPPCSSRIRETEGWASVSKEGRDLG

SEQ ID NO: 150 - protein, 190 aa, Homo sapiens
MNPQIRNPMKAMYPGTFYFQFKNLWEANDRNETWLCFTVEGIKRRSVVSWKTGVFRNQVDSETHCHAERCFLSWFCDDILSPNTKYQVTWYTSWSPCPDCAGEVAEFLARHSNVNLTIFTARLYYFQYPCYQEGLRSLSQEGVAVEIMDYEDFKYCWENFVYNDNEPFKPWKGLKTNFRLLKRRLRESLQ

SEQ ID NO: 151 - protein, 190 aa, Gorilla gorilla
MNPQIRNPMKAMYPGTFYFQFKNLWEANDRNETWLCFTVEGIKRRSVVSWKTGVFRNQVDSETHCHAERCFLSWECDDILSPNTNYQVTWYTSWSPCPECAGEVAEFLARHSNVNLTIFTARLYYFQDTDYQEGLRSLSQEGVAVKIMDYKDFKYCWENFVYNDDEPFKPWKGLKYNFRFLKRRLQEILE

SEQ ID NO: 152 - protein, 202 aa, Macaca mulatta
MDGSPASRPRHLMDPNTFTFNFNNDLSVRGRHQTYLCYEVERLDNGTWVPMDERRGFLCNKAKNVPCGDYGCHVELRFLCEVPSWQLDPAQTYRVTWFISWSPCFRRGCAGQVRVFLQENKHVRLRIFAARIYDYDPLYQEALRTLRDAGAQVSIMTYEEFKHCWDTFVDRQGRPFQPWDGLDEHSQALSGRLRAILQNQGN

SEQ ID NO: 153 - protein, 185 aa, Bos taurus
MDEYTFTENFNNQGWPSKTYLCYEMERLDGDATIPLDEYKGFVRNKGLDQPEKPCHAELYFLGKIHSWNLDRNQHYRLTCFISWSPCYDCAQKLTTFLKENHHISLHILASRIYTHNRFGCHQSGLCELQAAGARITIMTFEDFKHCWETFVDHKGKPFQPWEGLNVKSQALCTELQAILKTQQN

SEQ ID NO: 154 - protein, 200 aa, Homo sapiens
MALLTAETFRLQFNNKRRLRRPYYPRKALLCYQLTPQNGSTPTRGYFENKKKCHAEICFINEIKSMGLDETQCYQVTCYLTWSPCSSCAWELVDFIKAHDHLNLGIFASRLYYHWCKPQQKGLRLLCGSQVPVEVMGFPKFADCWENFVDHEKPLSFNPYKMLEELDKNSRAIKRRLERIKIPGVRAQGRYMDILCDAEV

SEQ ID NO: 155 - protein, 210 aa, Macaca mulatta
MALLTAKTFSLQFNNKRRVNKPYYPRKALLCYQLTPQNGSTPTRGHLKNKKKDHAEIRFINKIKSMGLDETQCYQVTCYLTWSPCPSCAGELVDFIKAHRHLNLRIFASRLYYHWRPNYQEGLLLLCGSQVPVEVMGLPEFTDCWENFVDHKEPPSFNPSEKLEELDKNSQAIKRRLERIKSRSVDVLENGLRSLQLGPVTPSSSIRNSR

SEQ ID NO: 156 - protein, 386 aa, Homo sapiens
MNPQIRNPMERMYRDTFYDNFENEPILYGRSYTWLCYEVKIKRGRSNLLWDTGVFRGPVLPKRQSNHRQEVYFRFENHAEMCFLSWFCGNRLPANRRFQITWFVSWNPCLPCVVKVTKFLAEHPNVTLTISAARLYYYRDRDWRWVLLRLHKAGARVKIMDYEDFAYCWENFVCNEGQPFMPWYKFDDNYASLHRTLKEILRNPMEAMYPHIFYFHFKNLLKACGRNESWLCFTMEVTKHHSAVFRKRGVFRNQVDPETHCHAERCFLSWFCDDILSPNTNYEVTWYTSWSPCPECAGEVAEFLARHSNVNLTIFTARLCYFWDTDYQEGLCSLSQEGASVKIMGYKDFVSCWKNFVYSDDEPFKPWKGLQTNFRLLKRRLREILQ

SEQ ID NO: 157 - protein, 236 aa, Homo sapiens
MTSEKGPSTGDPTLRRRIEPWEFDVFYDPRELRKEACLLYEIKWGMSRKIWRSSGKNTTNHVEVNFIKKFTSERDFHPSMSCSITWFLSWSPCWECSQAIREFLSRHPGVTLVIYVARLFWHMDQQNRQGLRDLVNSGVTIQIMRASEYYHCWRNFVNYPPGDEAHWPQYPPLWMMLYALELHCIILSLPPCLKISRRWQNHLTFFRLHLQNCHYQTIPPHILLATGLIHPSVAWR

SEQ ID NO: 158 - protein, 229 aa, Mus musculus
MSSETGPVAVDPTLRRRIEPHEFEVFFDPRELRKETCLLYEINWGGRHSVWRHTSQNTSNHVEVNFLEKFTTERYFRPNTRCSITWFLSWSPCGECSRAITEFLSRHPYVTLFIYIARLYHHTDQRNRQGLRDLISSGVTIQIMTEQEYCYCWRNFVNYPPSNEAYWPRYPHLWVKLYVLELYCIILGLPPCLKILRRKQPQLTFFTITLQTCHYQRIPPHLLWATGLK

SEQ ID NO: 159 - protein, 224 aa, Homo sapiens
MAQKEEAAVATEAASQNGEDLENLDDPEKLKELIELPPFEIVTGERLPANFFKFQFRNVEYSSGRNKTFLCYVVEAQGKGGQVQASRGYLEDEHAAAHAEEAFFNTILPAFDPALRYNVTWYVSSSPCAACADRIIKTLSKTKNLRLLILVGRLFMWEEPEIQAALKKLKEAGCKLRIMKPQDFEYVWQNFVEQEEGESKAFQPWEDIQENFLYYEEKLADILK

SEQ ID NO: 160 - protein, 224 aa, Mus musculus
MAQKEEAAEAAAPASQNGDDLENLEDPEKLKELIDLPPFEIVTGVRLPVNFFKFQFRNVEYSSGRNKTFLCYVVEVQSKGGQAQATQGYLEDEHAGAHAEEAFFNTILPAFDPALKYNVTWYVSSSPCAACADRILKTLSKTKNLRLLILVSRLFMWEEPEVQAALKKLKEAGCKLRIMKPQDFEYIWQNFVEQEEGESKAFEPWEDIQENFLYYEEKLADILK

SEQ ID NO: 161 - protein, 224 aa, Rattus norvegicus
MAQKEEAAEAAAPASQNGDDLENLEDPEKLKELIDLPPFEIVTGVRLPVNFFKFQFRNVEYSSGRNKTFLCYVVEAQSKGGQVQATQGYLEDEHAGAHAEEAFFNTILPAFDPALKYNVTWYVSSSPCAACADRILKTLSKTKNLRLLILVSRLFMWEEPEVQAALKKLKEAGCKLRIMKPQDFEYLWQNFVEQEEGESKAFEPWEDIQENFLYYEEKLADILK

SEQ ID NO: 162 - protein, 208 aa, Petromyzon marinus
MTDAEYVRIHEKLDIYTFKKQFFNNKKSVSHRCYVLFELKRRGERRACFWGYAVNKPQSGTERGIHAEIFSIRKVEEYLRDNPGQFTINWYSSWSPCADCAEKILEWYNQELRGNGHTLKIWACKLYYEKNARNQIGLWNLRDNGVGLNVMVSEHYQCCRKIFIQSSHNQLNENRWLEKTLKRAEKRRSELSFMIQVKILHTTKSPAV

SEQ ID NO: 163 - protein, 381 aa, Homo sapiens
MKPHFRNTVERMYRDTFSYNFYNRPILSRRNTVWLCYEVKTKGPSRPPLDAKIFRGQVYSELKYHPEMRFFHWFSKWRKLHRDQEYEVTWYISWSPCTKCTRDMATFLAEDPKVTLTIFVARLYYFWDPDYQEALRSLCQKRDGPRATMKFNYDEFQHCWSKFVYSQRELFEPWNNLPKYYILLHFMLGEILRHSMDPPTFTFNFNNEPWVRGRHETYLCYEVERMHNDTWVLLNQRRGFLCNQAPHKHGFLEGRHAELCFLDVIPFWKLDLDQDYRVTCFTSWSPCFSCAQEMAKFISKKHVSLCIFTARIYRRQGRCQEGLRTLAEAGAKISFTYSEFKHCWDTFVDHQGCPFQPWDGLDEHSQDLSGRLRAILQNQEN

SEQ ID NO: 164 - protein, 182 aa, Homo sapiens
MDPPTFTFNFNNEPWWGRHETYLCYEVERMHNDTWVLLNQRRGFLCNQAPHKHGFLEGRHAELCFLDVIPFWKLDLDQDYRVTCFTSWSPCFSCAQEMAKFISKNKHVSLCIFTARIYDDQGRCQEGLRTLAEAGAKISFTYSEFKHCWDTFVDHQGCPFQPWDGLDEHSQDLSGRLRAILQ

SEQ ID NO: 165 - protein, 184 aa, Homo sapiens
MDPPTFTFNFNNEPWVRGRHETYLCYEVERMHNDTWVLLNQRRGFLCNQAPHKHGFLEGRHAELCFLDVIPFWKLDLDQDYRVTCFTSWSPCFSCAQEMAKFISKNKHVSLCIFTARIYRRQGRCQEGLRTLAEAGAKISFMTYSEFKHCWDTFVDHQGCPFQPWDGLDEHSQDLSGRLRAILQ

SEQ ID NO: 166 - protein, 367 aa, Homo sapiens
MEPIYEEYLANHGTIVKPYYWLSFSLDCSNCPYHIRTGEEARVSLTEFCQIFGFPYGTTFPQTKHLTFYELKTSSGSLVQKGHASSCTGNYIHPESMLFEMNGYLDSAIYNNDSIRHIILYSNNSPCNEANHCCISKMYNFLITYPGITLSIYFSQLYHTEMDFPASAWNREALRSLASLWPRVVLSPISGGIWHSVLHSFISGVSGSHVFQPILTGRALADRHNAYEINAITGVKPYFTDVLLQTKRNPNTKAQEALESYPLNNAFPGQFFQMPSGQLQPNLPPDLRAPVVFVLVPLRDLPPMHMGQNPNKPRNIVRHLNMPQMSFQETKDLGRLPTGRSVEIVEITEQFASSKEADEKKKKKGKK

SEQ ID NO: 167 - protein, 388 aa, Rattus norvegicus
MEPLYEEYLTHSGTIVKPYYWLSVSLNCTNCPYHIRTGEEARVPYTEFHQTFGFPWSTYPQTKHLTFYELRSSSGNLIQKGLASNCTGSHTHPESMLFERDGYLDSLIFHDSNIRHIILYSNNSPCDEANHCCISKMYNFLMNYPEVTLSVFFSQLYHTENQFPTSAWNREALRGLASLWPQVTLSAISGGIWQSILETFVSGISEGLTAVRPFTAGRTLTDRYNAYEINCITEVKPYFTDALHSWQKENQDQKVWAASENQPLHNTTPAQWQPDMSQDCRTPAVFMLVPYRDLPPIHVNPSPQKPRTVVRHLNTLQLSASKVKALRKSPSGRPVKKEEARKGSTRSQEANETNKSKWKKQTLFIKSNICHLLEREQKKIGILSSWSV

SEQ ID NO: 168 - protein, 363 aa, Macaca fascicularis
MEPTYEEYLANHGTIVKPYYWLSFSLDCSNCPYHIRTGEEARVSLTEFCQIFGFPYGTTYPQTKHLTFYELKTSSGSLVQKGHASSCTGNYIHPESMLFEMNGYLDSAIYNNDSIRHIILYCNNSPCNEANHCCISKVYNFLITYPGITLSIYFSQLYHTEMDFPASAWNREALRSLASLWPRVVLSPISGGIWHSVLHSFVSGVSGSHVFQPILTGRALTDRYNAYEINAITGVKPFFTDVLLHTKRNPNTKAQMALESYPLNNAFPGQSFQMTSGIPPDLRAPVVFVLLPLRDLPPMHMGQDPNKPRNIIRHLNMPQMSFQETKDLERLPTRRSVETVEITERFASSKQAEEKTKKKKGKK

SEQ ID NO: 169 - protein, 224 aa, Petromyzon marinus
MAGYECVRVSEKLDFDTFEFQFENLHYATERHRTYVIFDVKPQSAGGRSRRLWGYIINNPNVCHAELILMSMIDRHLESNPGVYAMTWYMSWSPCANCSSKLNPWLKNLLEEQGHTLTMHFSRIYDRDREGDHRGLRGLKHVSNSFRMGVVGRAEVKECLAEYVEASRRTLTWLDTTESMAAKMRRKLFCILVRCAGMRESGIPLHLFTLQTPLLSGRVVWWRV

SEQ ID NO: 170 - protein, 331 aa, Petromyzon marinus
MELREVVDCALASCVRHEPLSRVAFLRCFAAPSQKPRGTVILFYVEGAGRGVTGGHAVNYNKQGTSIHAEVLLLSAVRAALLRRRRCEDGEEATRGCTLHCYSTYSPCRDCVEYIQEFGASTGVRVVIHCCRLYELDVNRRRSEAEGVLRSLSRLGRDFRLMGPRDAIALLLGGRLANTADGESGASGNAWVTETNVVEPLVDMTGFGDEDLHAQVQRNKQIREAYANYASAVSLMLGELHVDPDKFPFLAEFLAQTSVEPSGTPRETRGRPRGASSRGPEIGRQRPADFERALGAYGLFLHPRIVSREADREEIKRDLIVVMRKHNYQGP

SEQ ID NO: 171 - protein, 209 aa, Petromyzon marinus
MAGDENVRVSEKLDFDTFEFQFENLHYATERHRTYVIFDVKPQSAGGRSRRLWGYIINNPNVCHAELILMSMIDRHLESNPGVYAMTWYMSWSPCANCSSKLNPWLKNLLEEQGHTLMMHFSRIYDRDREGDHRGLRGLKHVSNSFRMGVVGRAEVKECLAEYVEASRRTLTWLDTTESMAAKMRRKLFCILVRCAGMRESGMPLHLFT

SEQ ID NO: 172 - protein, 158 aa, Saccharomyces cerevisiae
MVTGGMASKWDQKGMDIAYEEAALGYKEGGVPIGGCLINNKDGSVLGRGHNMRFQKGSATLHGEISTLENCGRLEGKVYKDTTLYTTLSPCDMCTGAIIMYGIPRCVVGENVNFKSKGEKYLQTRGHEVVVVDDERCKKIMKQFIDERPQDWFEDIGE

SEQ ID NO: 173 - protein, 218 aa, Artificial Sequence
  Description of Artificial Sequence: Synthetic polypeptide
MSSETGPVAVDPTLRRRIEPHEFEVFFDPRELRKETCLLYEINWGGRHSIWRHTSQNTNKHVEVNFIEKFTTERYFCPNTRCSITWFLSWSPCGECSRAITEFLSRYPHVTLFIYIARLYHHADPRNRQGLRDLISSGVTIQIMTEQESGYCWRNFVNYSPSNEAHWPRYPHLWVRGLPPCLNILRRKQPQLTFFTIALQSCHYQRLPPHILWATGLK

SEQ ID NO: 174 - protein, 218 aa, Artificial Sequence
  Description of Artificial Sequence: Synthetic polypeptide
MSSETGPVAVDPTLRRRIEPHEFEVFFDPRELRKETCLLYEINWGGRHSIWRHTSQNTNKHVEVNFIEKFTTERYFCPNTRCSITWFLSWSPCGECSRAITEFLSRYPHVTLFIYIARLYHHADPRNRQGLRDLISSGVTIQIMTEQESGYCWRNFVNYSPSNEAHWPRYPHLWVRLYVLELYCIILGLPPCLNILRRKQPQHYQRLPPHILWATGLK

SEQ ID NO: 175 - protein, 8 aa, Artificial Sequence
  Description of Artificial Sequence: Synthetic peptide
SGGSSGGS

SEQ ID NO: 176 - protein, 1609 aa, Artificial Sequence
  Description of Artificial Sequence: Synthetic polypeptide
MSEVEFSHEYWMRHALTLAKRARDEREVPVGAVLVLNNRVIGEGWNRAIGLHDPTAHAEIMALRQGGLVMQNYRLIDATLYVTFEPCVMCAGAMIHSRIGRVVFGVRNAKTGAAGSLMDVLHYPGMNHRVEITEGILADECAALLCTFFRMPRQVFNAQKKAQSSTDSGGSSGGSSGSETPGTSESATPESSGGSSGGSEIGKATAKYFFYSNIMNFFKTEITLANGEIRKRPLIETNGETGEIVWDKGRDFATVRKVLSMPQVNIVKKTEVQTGGFSKESILPKRNSDKLIARKKDWDPKKYGGFMQPTVAYSVLVVAKVEKGKSKKLKSVKELLGITIMERSSFEKNPIDFLEAKGYKEVKKDLIIKLPKYSLFELENGRKRMLASAKFLQKGNELALPSKYVNFLYLASHYEKLKGSPEDNEQKQLFVEQHKHYLDEIIEQISEFSKRVILADANLDKVLSAYNKHRDKPIREQAENIIHLFTLTNLGAPRAFKYFDTTIARKEYRSTKEVLDATLIHQSITGLYETRIDLSQLGGDGGSGGSGGSGGSGGSGGSGGMDKKYSIGLAIGTNSVGWAVITDEYKVPSKKFKVLGNTDRHSIKKNLIGALLFDSGETAEATRLKRTARRRYTRRKNRICYLQEIFSNEMAKVDDSFFHRLEESFLVEEDKKHERHPIFGNIVDEVAYHEKYPTIYHLRKKLVDSTDKADLRLIYLALAHMIKFRGHFLIEGDLNPDNSDVDKLFIQLVQTYNQLFEENPINASGVDAKAILSARLSKSRRLENLIAQLPGEKKNGLFGNLIALSLGLTPNFKSNFDLAEDAKLQLSKDTYDDDLDNLLAQIGDQYADLFLAAKNLSDAILLSDILRVNTEITKAPLSASMIKRYDEHHQDLTLLKALVRQQLPEKYKEIFFDQSKNGYAGYIDGGASQEEFYKFIKPILEKMDGTEELLVKLNREDLLRKQRTFDNGSIPHQIHLGELHAILRRQEDFYPFLKDNREKIEKILTFRIPYYVGPLARGNSRFAWMTRKSEETITPWNFEEVVDKGASAQSFIERMTNFDKNLPNEKVLPKHSLLYEYFTVYNELTKVKYVTEGMRKPAFLSGEQKKAIVDLLFKTNRKVTVKQLKEDYFKKIECFDSVEISGVEDRFNASLGTYHDLLKIIKDKDFLDNEENEDILEDIVLTLTLFEDREMIEERLKTYAHLFDDKVMKQLKRRRYTGWGRLSRKLINGIRDKQSGKTILDFLKSDGFANRNFMQLIHDDSLTFKEDIQKAQVSGQGDSLHEHIANLAGSPAIKKGILQTVKVVDELVKVMGRHKPENIVIEMARENQTTQKGQKNSRERMKRIEEGIKELGSQILKEHPVENTQLQNEKLYLYYLQNGRDMYVDQELDINRLSDYDVDHIVPQSFLKDDSIDNKVLTRSDKNRGKSDNVPSEEVVKKMKNYWRQLLNAKLITQRKFDNLTKAERGGLSELDKAGFIKRQLVETRQITKHVAQILDSRMNTKYDENDKLIREVKVITLKSKLVSDFRKDFQFYKVREINNYHHAHDAYLNAVVGTALIKKYPKLESEFVYGDYKVYDVRKMIAKSEQEGADKRTADGSEFESPKKKRKV

SEQ ID NO: 177 - protein, 1807 aa, Artificial Sequence
  Description of Artificial Sequence: Synthetic polypeptide
MSEVEFSHEYWMRHALTLAKRAWDEREVPVGAVLVHNNRVIGEGWNRPIGRHDPTAHAEIMALRQGGLVMQNYRLIDATLYVTLEPCVMCAGAMIHSRIGRVVFGARDAKTGAAGSLMDVLHHPGMNHRVEITEGILADECAALLSDFFRMRRQEIKAQKKAQSSTDGGSSGGSSGSETPGTSESATPESSGGSSGGSMSEVEFSHEYWMRHALTLAKRARDEREVPVGAVLVLNNRVIGEGWNRAIGLHDPTAHAEIMALRQGGLVMQNYRLIDATLYVTFEPCVMCAGAMIHSRIGRVVFGVRNAKTGAAGSLMDVLHYPGMNHRVEITEGILADECAALLCTFFRMPRQVFNAQKKAQSSTDSGGSSGGSSGSETPGTSESATPESSGGSSGGSEIGKATAKYFFYSNIMNFFKTEITLANGEIRKRPLIETNGETGEIVWDKGRDFATVRKVLSMPQVNIVKKTEVQTGGFSKESILPKRNSDKLIARKKDWDPKKYGGFMQPTVAYSVLVVAKVEKGKSKKLKSVKELLGITIMERSSFEKNPIDFLEAKGYKEVKKDLIIKLPKYSLFELENGRKRMLASAKFLQKGNELALPSKYVNFLYLASHYEKLKGSPEDNEQKQLFVEQHKHYLDEIIEQISEFSKRVILADANLDKVLSAYNKHRDKPIREQAENIIHLFTLTNLGAPRAFKYFDTTIARKEYRSTKEVLDATLIHQSITGLYETRIDLSQLGGDGGSGGSGGSGGSGGSGGSGGMDKKYSIGLAIGTNSVGWAVITDEYKVPSKKFKVLGNTDRHSIKKNLIGALLFDSGETAEATRLKRTARRRYTRRKNRICYLQEIFSNEMAKVDDSFFHRLEESFLVEEDKKHERHPIFGNIVDEVAYHEKYPTIYHLRKKLVDSTDKADLRLIYLALAHMIKFRGHFLIEGDLNPDNSDVDKLFIQLVQTYNQLFEENPINASGVDAKAILSARLSKSRRLENLIAQLPGEKKNGLFGNLIALSLGLTPNFKSNFDLAEDAKLQLSKDTYDDDLDNLLAQIGDQYADLFLAAKNLSDAILLSDILRVNTEITKAPLSASMIKRYDEHHQDLTLLKALVRQQLPEKYKEIFFDQSKNGYAGYIDGGASQEEFYKFIKPILEKMDGTEELLVKLNREDLLRKQRTFDNGSIPHQIHLGELHAILRRQEDFYPFLKDNREKIEKILTFRIPYYVGPLARGNSRFAWMTRKSEETITPWNFEEVVDKGASAQSFIERMTNFDKNLPNEKVLPKHSLLYEYFTVYNELTKVKYVTEGMRKPAFLSGEQKKAIVDLLFKTNRKVTVKQLKEDYFKKIECFDSVEISGVEDRFNASLGTYHDLLKIIKDKDFLDNEENEDILEDIVLTLTLFEDREMIEERLKTYAHLFDDKVMKQLKRRRYTGWGRLSRKLINGIRDKQSGKTILDFLKSDGFANRNFMQLIHDDSLTFKEDIQKAQVSGQGDSLHEHIANLAGSPAIKKGILQTVKVVDELVKVMGRHKPENIVIEMARENQTTQKGQKNSRERMKRIEEGIKELGSQILKEHPVENTQLQNEKLYLYYLQNGRDMYVDQELDINRLSDYDVDHIVPQSFLKDDSIDNKVLTRSDKNRGKSDNVPSEEVVKKMKNYWRQLLNAKLITQRKFDNLTKAERGGLSELDKAGFIKRQLVETRQITKHVAQILDSRMNTKYDENDKLIREVKVITLKSKLVSDFRKDFQFYKVREINNYHHAHDAYLNAVVGTALIKKYPKLESEFVYGDYKVYDVRKMIAKSEQEGADKRTADGSEFESPKKKRKV

SEQ ID NO: 178 - protein, 1588 aa, Artificial Sequence
  Description of Artificial Sequence: Synthetic polypeptide
MSEVEFSHEYWMRHALTLAKRARDEREVPVGAVLVLNNRVIGEGWNRAIGLHDPTAHAEIMALRQGGLVMQNYRLIDATLYVTFEPCVMCAGAMIHSRIGRVVFGVRNAKTGAAGSLMDVLHYPGMNHRVEITEGILADECAALLCTFFRMPRQVFNAQKKAQSSTDSGGSSGGSSGSETPGTSESATPESSGGSSGGSDKKYSIGLAIGTNSVGWAVITDEYKVPSKKFKVLGNTDRHSIKKNLIGALLFDSGETAEATRLKRTARRRYTRRKNRICYLQEIFSNEMAKVDDSFFHRLEESFLVEEDKKHERHPIFGNIVDEVAYHEKYPTIYHLRKKLVDSTDKADLRLIYLALAHMIKFRGHFLIEGDLNPDNSDVDKLFIQLVQTYNQLFEENPINASGVDAKAILSARLSKSRRLENLIAQLPGEKKNGLFGNLIALSLGLTPNFKSNFDLAEDAKLQLSKDTYDDDLDNLLAQIGDQYADLFLAAKNLSDAILLSDILRVNTEITKAPLSASMIKRYDEHHQDLTLLKALVRQQLPEKYKEIFFDQSKNGYAGYIDGGASQEEFYKFIKPILEKMDGTEELLVKLNREDLLRKQRTFDNGSIPHQIHLGELHAILRRQEDFYPFLKDNREKIEKILTFRIPYYVGPLARGNSRFAWMTRKSEETITPWNFEEVVDKGASAQSFIERMTNFDKNLPNEKVLPKHSLLYEYFTVYNELTKVKYVTEGMRKPAFLSGEQKKAIVDLLFKTNRKVTVKQLKEDYFKKIECFDSVEISGVEDRFNASLGTYHDLLKIIKDKDFLDNEENEDILEDIVLTLTLFEDREMIEERLKTYAHLFDDKVMKQLKRRRYTGWGRLSRKLINGIRDKQSGKTILDFLKSDGFANRNFMQLIHDDSLTFKEDIQKAQVSGQGDSLHEHIANLAGSPAIKKGILQTVKVVDELVKVMGRHKPENIVIEMARENQTTQKGQKNSRERMKRIEEGIKELGSQILKEHPVENTQLQNEKLYLYYLQNGRDMYVDQELDINRLSDYDVDHIVPQSFLKDDSIDNKVLTRSDKNRGKSDNVPSEEVVKKMKNYWRQLLNAKLITQRKFDNLTKAERGGLSELDKAGFIKRQLVETRQITKHVAQILDSRMNTKYDENDKLIREVKVITLKSKLVSDFRKDFQFYKVREINNYHHAHDAYLNAVVGTALIKKYPKLESEFVYGDYKVYDVRKMIAKSEQEIGKATAKYFFYSNIMNFFKTEITLANGEIRKRPLIETNGETGEIVWDKGRDFATVRKVLSMPQVNIVKKTEVQTGGFSKESILPKRNSDKLIARKKDWDPKKYGGFVSPTVAYSVLVVAKVEKGKSKKLKSVKELLGITIMERSSFEKNPIDFLEAKGYKEVKKDLIIKLPKYSLFELENGRKRMLASARELQKGNELALPSKYVNFLYLASHYEKLKGSPEDNEQKQLFVEQHKHYLDEIIEQISEFSKRVILADANLDKVLSAYNKHRDKPIREQAENIIHLFTLTNLGAPAAFKYFDTTIDRKQYRSTKEVLDATLIHQSITGLYETRIDLSQLGGDEGADKRTADGSEFESPKKKRKV

SEQ ID NO: 179 - protein, 1588 aa, Artificial Sequence
  Description of Artificial Sequence: Synthetic polypeptide
MSEVEFSHEYWMRHALTLAKRARDEREVPVGAVLVLNNRVIGEGWNRAIGLHDPTAHAEIMALRQGGLVMQNYRLIDATLYVTFEPCVMCAGAMIHSRIGRVVFGVRNAKTGAAGSLMDVLHYPGMNHRVEITEGILADECAALLCRFFRMPRQVFNAQKKAQSSTDSGGSSGGSSGSETPGTSESATPESSGGSSGGSDKKYSIGLAIGTNSVGWAVITDEYKVPSKKFKVLGNTDRHSIKKNLIGALLFDSGETAEATRLKRTARRRYTRRKNRICYLQEIFSNEMAKVDDSFFHRLEESFLVEEDKKHERHPIFGNIVDEVAYHEKYPTIYHLRKKLVDSTDKADLRLIYLALAHMIKFRGHFLIEGDLNPDNSDVDKLFIQLVQTYNQLFEENPINASGVDAKAILSARLSKSRRLENLIAQLPGEKKNGLFGNLIALSLGLTPNFKSNFDLAEDAKLQLSKDTYDDDLDNLLAQIGDQYADLFLAAKNLSDAILLSDILRVNTEITKAPLSASMIKRYDEHHQDLTLLKALVRQQLPEKYKEIFFDQSKNGYAGYIDGGASQEEFYKFIKPILEKMDGTEELLVKLNREDLLRKQRTFDNGSIPHQIHLGELHAILRRQEDFYPFLKDNREKIEKILTFRIPYYVGPLARGNSRFAWMTRKSEETITPWNFEEVVDKGASAQSFIERMTNFDKNLPNEKVLPKHSLLYEYFTVYNELTKVKYVTEGMRKPAFLSGEQKKAIVDLLFKTNRKVTVKQLKEDYFKKIECFDSVEISGVEDRFNASLGTYHDLLKIIKDKDFLDNEENEDILEDIVLTLTLFEDREMIEERLKTYAHLFDDKVMKQLKRRRYTGWGRLSRKLINGIRDKQSGKTILDFLKSDGFANRNFMQLIHDDSLTFKEDIQKAQVSGQGDSLHEHIANLAGSPAIKKGILQTVKVVDELVKVMGRHKPENIVIEMARENQTTQKGQKNSRERMKRIEEGIKELGSQILKEHPVENTQLQNEKLYLYYLQNGRDMYVDQELDINRLSDYDVDHIVPQSFLKDDSIDNKVLTRSDKNRGKSDNVPSEEVVKKMKNYWRQLLNAKLITQRKFDNLTKAERGGLSELDKAGFIKRQLVETRQITKHVAQILDSRMNTKYDENDKLIREVKVITLKSKLVSDFRKDFQFYKVREINNYHHAHDAYLNAVVGTALIKKYPKLESEFVYGDYKVYDVRKMIAKSEQEIGKATAKYFFYSNIMNFFKTEITLANGEIRKRPLIETNGETGEIVWDKGRDFATVRKVLSMPQVNIVKKTEVQTGGFSKESILPKRNSDKLIARKKDWDPKKYGGFVSPTVAYSVLVVAKVEKGKSKKLKSVKELLGITIMERSSFEKNPIDFLEAKGYKEVKKDLIIKLPKYSLFELENGRKRMLASARELQKGNELALPSKYVNFLYLASHYEKLKGSPEDNEQKQLFVEQHKHYLDEIIEQISEFSKRVILADANLDKVLSAYNKHRDKPIREQAENIIHLFTLTNLGAPAAFKYFDTTIDRKQYRSTKEVLDATLIHQSITGLYETRIDLSQLGGDEGADKRTADGSEFESPKKKRKV

SEQ ID NO: 180 - protein, 1588 aa, Artificial Sequence
  Description of Artificial Sequence: Synthetic polypeptide
MSEVEFSHEYWMRHALTLAKRARDEREVPVGAVLVLNNRVIGEGWNRAIGLHDPTAHAEIMALRQGGLVMQNYRLIDATLYVTFEPCVMCAGAMIHSRIGRVVFGVRNAKTGAAGSLMDVLHYPGMNHRVEITEGILADECAALLCYFFRMPRSVFNAQKKAQSSTDSGGSSGGSSGSETPGTSESATPESSGGSSGGSDKKYSIGLAIGTNSVGWAVITDEYKVPSKKFKVLGNTDRHSIKKNLIGALLFDSGETAEATRLKRTARRRYTRRKNRICYLQEIFSNEMAKVDDSFFHRLEESFLVEEDKKHERHPIFGNIVDEVAYHEKYPTIYHLRKKLVDSTDKADLRLIYLALAHMIKFRGHFLIEGDLNPDNSDVDKLFIQLVQTYNQLFEENPINASGVDAKAILSARLSKSRRLENLIAQLPGEKKNGLFGNLIALSLGLTPNFKSNFDLAEDAKLQLSKDTYDDDLDNLLAQIGDQYADLFLAAKNLSDAILLSDILRVNTEITKAPLSASMIKRYDEHHQDLTLLKALVRQQLPEKYKEIFFDQSKNGYAGYIDGGASQEEFYKFIKPILEKMDGTEELLVKLNREDLLRKQRTFDNGSIPHQIHLGELHAILRRQEDFYPFLKDNREKIEKILTFRIPYYVGPLARGNSRFAWMTRKSEETITPWNFEEVVDKGASAQSFIERMTNFDKNLPNEKVLPKHSLLYEYFTVYNELTKVKYVTEGMRKPAFLSGEQKKAIVDLLFKTNRKVTVKQLKEDYFKKIECFDSVEISGVEDRFNASLGTYHDLLKIIKDKDFLDNEENEDILEDIVLTLTLFEDREMIEERLKTYAHLFDDKVMKQLKRRRYTGWGRLSRKLINGIRDKQSGKTILDFLKSDGFANRNFMQLIHDDSLTFKEDIQKAQVSGQGDSLHEHIANLAGSPAIKKGILQTVKVVDELVKVMGRHKPENIVIEMARENQTTQKGQKNSRERMKRIEEGIKELGSQILKEHPVENTQLQNEKLYLYYLQNGRDMYVDQELDINRLSDYDVDHIVPQSFLKDDSIDNKVLTRSDKNRGKSDNVPSEEVVKKMKNYWRQLLNAKLITQRKFDNLTKAERGGLSELDKAGFIKRQLVETRQITKHVAQILDSRMNTKYDENDKLIREVKVITLKSKLVSDFRKDFQFYKVREINNYHHAHDAYLNAVVGTALIKKYPKLESEFVYGDYKVYDVRKMIAKSEQEIGKATAKYFFYSNIMNFFKTEITLANGEIRKRPLIETNGETGEIVWDKGRDFATVRKVLSMPQVNIVKKTEVQTGGFSKESILPKRNSDKLIARKKDWDPKKYGGFVSPTVAYSVLVVAKVEKGKSKKLKSVKELLGITIMERSSFEKNPIDFLEAKGYKEVKKDLIIKLPKYSLFELENGRKRMLASARELQKGNELALPSKYVNFLYLASHYEKLKGSPEDNEQKQLFVEQHKHYLDEIIEQISEFSKRVILADANLDKVLSAYNKHRDKPIREQAENIIHLFTLTNLGAPAAFKYFDTTIDRKQYRSTKEVLDATLIHQSITGLYETRIDLSQLGGDEGADKRTADGSEFESPKKKRKV

SEQ ID NO: 181 - protein, 1588 aa, Artificial Sequence
  Description of Artificial Sequence: Synthetic polypeptide
MSEVEFSHEYWMRHALTLAKRARDEREVPVGAVLVLNNRVIGEGWNRAIGLHDPTAHAEIMALRQGGLVMQNYRLIDATLYVTFEPCVMCAGAMIHSRIGRVVFGVRNAKTGAAGSLMDVLHHPGMNHRVEITEGILADECAALLCYFFRMPRQVFNAQKKAQSSTDSGGSSGGSSGSETPGTSESATPESSGGSSGGSDKKYSIGLAIGTNSVGWAVITDEYKVPSKKFKVLGNTDRHSIKKNLIGALLFDSGETAEATRLKRTARRRYTRRKNRICYLQEIFSNEMAKVDDSFFHRLEESFLVEEDKKHERHPIFGNIVDEVAYHEKYPTIYHLRKKLVDSTDKADLRLIYLALAHMIKFRGHFLIEGDLNPDNSDVDKLFIQLVQTYNQLFEENPINASGVDAKAILSARLSKSRRLENLIAQLPGEKKNGLFGNLIALSLGLTPNFKSNFDLAEDAKLQLSKDTYDDDLDNLLAQIGDQYADLFLAAKNLSDAILLSDILRVNTEITKAPLSASMIKRYDEHHQDLTLLKALVRQQLPEKYKEIFFDQSKNGYAGYIDGGASQEEFYKFIKPILEKMDGTEELLVKLNREDLLRKQRTFDNGSIPHQIHLGELHAILRRQEDFYPFLKDNREKIEKILTFRIPYYVGPLARGNSRFAWMTRKSEETITPWNFEEVVDKGASAQSFIERMTNFDKNLPNEKVLPKHSLLYEYFTVYNELTKVKYVTEGMRKPAFLSGEQKKAIVDLLFKTNRKVTVKQLKEDYFKKIECFDSVEISGVEDRFNASLGTYHDLLKIIKDKDFLDNEENEDILEDIVLTLTLFEDREMIEERLKTYAHLFDDKVMKQLKRRRYTGWGRLSRKLINGIRDKQSGKTILDFLKSDGFANRNFMQLIHDDSLTFKEDIQKAQVSGQGDSLHEHIANLAGSPAIKKGILQTVKVVDELVKVMGRHKPENIVIEMARENQTTQKGQKNSRERMKRIEEGIKELGSQILKEHPVENTQLQNEKLYLYYLQNGRDMYVDQELDINRLSDYDVDHIVPQSFLKDDSIDNKVLTRSDKNRGKSDNVPSEEVVKKMKNYWRQLLNAKLITQRKFDNLTKAERGGLSELDKAGFIKRQLVETRQITKHVAQILDSRMNTKYDENDKLIREVKVITLKSKLVSDFRKDFQFYKVREINNYHHAHDAYLNAVVGTALIKKYPKLESEFVYGDYKVYDVRKMIAKSEQEIGKATAKYFFYSNIMNFFKTEITLANGEIRKRPLIETNGETGEIVWDKGRDFATVRKVLSMPQVNIVKKTEVQTGGFSKESILPKRNSDKLIARKKDWDPKKYGGFVSPTVAYSVLVVAKVEKGKSKKLKSVKELLGITIMERSSFEKNPIDFLEAKGYKEVKKDLIIKLPKYSLFELENGRKRMLASARELQKGNELALPSKYVNFLYLASHYEKLKGSPEDNEQKQLFVEQHKHYLDEIIEQISEFSKRVILADANLDKVLSAYNKHRDKPIREQAENIIHLFTLTNLGAPAAFKYFDTTIDRKQYRSTKEVLDATLIHQSITGLYETRIDLSQLGGDEGADKRTADGSEFESPKKKRKV

SEQ ID NO: 182 - protein, 1588 aa, Artificial Sequence
  Description of Artificial Sequence: Synthetic polypeptide
MSEVEFSHEYWMRHALTLAKRARDEREVPVGAVLVLNNRVIGEGWNRAIGLHDPTAHAEIMALRQGGLVMQNYRLIDATLYSTFEPCVMCAGAMIHSRIGRVVFGVRNAKTGAAGSLMDVLHYPGMNHRVEITEGILADECAALLCYFFRMPRQVFNAQKKAQSSTDSGGSSGGSSGSETPGTSESATPESSGGSSGGSDKKYSIGLAIGTNSVGWAVITDEYKVPSKKFKVLGNTDRHSIKKNLIGALLFDSGETAEATRLKRTARRRYTRRKNRICYLQEIFSNEMAKVDDSFFHRLEESFLVEEDKKHERHPIFGNIVDEVAYHEKYPTIYHLRKKLVDSTDKADLRLIYLALAHMIKFRGHFLIEGDLNPDNSDVDKLFIQLVQTYNQLFEENPINASGVDAKAILSARLSKSRRLENLIAQLPGEKKNGLFGNLIALSLGLTPNFKSNFDLAEDAKLQLSKDTYDDDLDNLLAQIGDQYADLFLAAKNLSDAILLSDILRVNTEITKAPLSASMIKRYDEHHQDLTLLKALVRQQLPEKYKEIFFDQSKNGYAGYIDGGASQEEFYKFIKPILEKMDGTEELLVKLNREDLLRKQRTFDNGSIPHQIHLGELHAILRRQEDFYPFLKDNREKIEKILTFRIPYYVGPLARGNSRFAWMTRKSEETITPWNFEEVVDKGASAQSFIERMTNFDKNLPNEKVLPKHSLLYEYFTVYNELTKVKYVTEGMRKPAFLSGEQKKAIVDLLFKTNRKVTVKQLKEDYFKKIECFDSVEISGVEDRFNASLGTYHDLLKIIKDKDFLDNEENEDILEDIVLTLTLFEDREMIEERLKTYAHLFDDKVMKQLKRRRYTGWGRLSRKLINGIRDKQSGKTILDFLKSDGFANRNFMQLIHDDSLTFKEDIQKAQVSGQGDSLHEHIANLAGSPAIKKGILQTVKVVDELVKVMGRHKPENIVIEMARENQTTQKGQKNSRERMKRIEEGIKELGSQILKEHPVENTQLQNEKLYLYYLQNGRDMYVDQELDINRLSDYDVDHIVPQSFLKDDSIDNKVLTRSDKNRGKSDNVPSEEVVKKMKNYWRQLLNAKLITQRKFDNLTKAERGGLSELDKAGFIKRQLVETRQITKHVAQILDSRMNTKYDENDKLIREVKVITLKSKLVSDFRKDFQFYKVREINNYHHAHDAYLNAVVGTALIKKYPKLESEFVYGDYKVYDVRKMIAKSEQEIGKATAKYFFYSNIMNFFKTEITLANGEIRKRPLIETNGETGEIVWDKGRDFATVRKVLSMPQVNIVKKTEVQTGGFSKESILPKRNSDKLIARKKDWDPKKYGGFVSPTVAYSVLVVAKVEKGKSKKLKSVKELLGITIMERSSFEKNPIDFLEAKGYKEVKKDLIIKLPKYSLFELENGRKRMLASARELQKGNELALPSKYVNFLYLASHYEKLKGSPEDNEQKQLFVEQHKHYLDEIIEQISEFSKRVILADANLDKVLSAYNKHRDKPIREQAENIIHLFTLTNLGAPAAFKYFDTTIDRKQYRSTKEVLDATLIHQSITGLYETRIDLSQLGGDEGADKRTADGSEFESPKKKRKV

SEQ ID NO: 183 - protein, 1588 aa, Artificial Sequence
  Description of Artificial Sequence: Synthetic polypeptide
MSEVEFSHEYWMRHALTLAKRARDEREVPVGAVLVLNNRVIGEGWNRAIGLHDPTAHAEIMALRQGGLVMQNYRLIDATLYVTFEPCVMCAGAMIHSRIGRVVFGVRNAKTGAAGSLMDVLHYPGMNHRVEITEGILADECAALLCYFFRMPRQVFNAQKKAQSSRDSGGSSGGSSGSETPGTSESATPESSGGSSGGSDKKYSIGLAIGTNSVGWAVITDEYKVPSKKFKVLGNTDRHSIKKNLIGALLFDSGETAEATRLKRTARRRYTRRKNRICYLQEIFSNEMAKVDDSFFHRLEESFLVEEDKKHERHPIFGNIVDEVAYHEKYPTIYHLRKKLVDSTDKADLRLIYLALAHMIKFRGHFLIEGDLNPDNSDVDKLFIQLVQTYNQLFEENPINASGVDAKAILSARLSKSRRLENLIAQLPGEKKNGLFGNLIALSLGLTPNFKSNFDLAEDAKLQLSKDTYDDDLDNLLAQIGDQYADLFLAAKNLSDAILLSDILRVNTEITKAPLSASMIKRYDEHHQDLTLLKALVRQQLPEKYKEIFFDQSKNGYAGYIDGGASQEEFYKFIKPILEKMDGTEELLVKLNREDLLRKQRTFDNGSIPHQIHLGELHAILRRQEDFYPFLKDNREKIEKILTFRIPYYVGPLARGNSRFAWMTRKSEETITPWNFEEVVDKGASAQSFIERMTNFDKNLPNEKVLPKHSLLYEYFTVYNELTKVKYVTEGMRKPAFLSGEQKKAIVDLLFKTNRKVTVKQLKEDYFKKIECFDSVEISGVEDRFNASLGTYHDLLKIIKDKDFLDNEENEDILEDIVLTLTLFEDREMIEERLKTYAHLFDDKVMKQLKRRRYTGWGRLSRKLINGIRDKQSGKTILDFLKSDGFANRNFMQLIHDDSLTFKEDIQKAQVSGQGDSLHEHIANLAGSPAIKKGILQTVKVVDELVKVMGRHKPENIVIEMARENQTTQKGQKNSRERMKRIEEGIKELGSQILKEHPVENTQLQNEKLYLYYLQNGRDMYVDQELDINRLSDYDVDHIVPQSFLKDDSIDNKVLTRSDKNRGKSDNVPSEEVVKKMKNYWRQLLNAKLITQRKFDNLTKAERGGLSELDKAGFIKRQLVETRQITKHVAQILDSRMNTKYDENDKLIREVKVITLKSKLVSDFRKDFQFYKVREINNYHHAHDAYLNAVVGTALIKKYPKLESEFVYGDYKVYDVRKMIAKSEQEIGKATAKYFFYSNIMNFFKTEITLANGEIRKRPLIETNGETGEIVWDKGRDFATVRKVLSMPQVNIVKKTEVQTGGFSKESILPKRNSDKLIARKKDWDPKKYGGFVSPTVAYSVLVVAKVEKGKSKKLKSVKELLGITIMERSSFEKNPIDFLEAKGYKEVKKDLIIKLPKYSLFELENGRKRMLASARELQKGNELALPSKYVNFLYLASHYEKLKGSPEDNEQKQLFVEQHKHYLDEIIEQISEFSKRVILADANLDKVLSAYNKHRDKPIREQAENIIHLFTLTNLGAPAAFKYFDTTIDRKQYRSTKEVLDATLIHQSITGLYETRIDLSQLGGDEGADKRTADGSEFESPKKKRKV

SEQ ID NO: 184 - protein, 1588 aa, Artificial Sequence
  Description of Artificial Sequence: Synthetic polypeptide
MSEVEFSHEYWMRHALTLAKRARDEREVPVGAVLVLNNRVIGEGWNRAIGLHDPTAHAEIMALRQGGLVMQNYRLIDATLYVTFEPCVMCAGAMIHSRIGRVVFGVRNAKTGAAGSLMDVLHYPGMNHRVEITEGILADECAALLCYFFRMPRRVFNAQKKAQSSTDSGGSSGGSSGSETPGTSESATPESSGGSSGGSDKKYSIGLAIGTNSVGWAVITDEYKVPSKKFKVLGNTDRHSIKKNLIGALLFDSGETAEATRLKRTARRRYTRRKNRICYLQEIFSNEMAKVDDSFFHRLEESFLVEEDKKHERHPIFGNIVDEVAYHEKYPTIYHLRKKLVDSTDKADLRLIYLALAHMIKFRGHFLIEGDLNPDNSDVDKLFIQLVQTYNQLFEENPINASGVDAKAILSARLSKSRRLENLIAQLPGEKKNGLFGNLIALSLGLTPNFKSNFDLAEDAKLQLSKDTYDDDLDNLLAQIGDQYADLFLAAKNLSDAILLSDILRVNTEITKAPLSASMIKRYDEHHQDLTLLKALVRQQLPEKYKEIFFDQSKNGYAGYIDGGASQEEFYKFIKPILEKMDGTEELLVKLNREDLLRKQRTFDNGSIPHQIHLGELHAILRRQEDFYPFLKDNREKIEKILTFRIPYYVGPLARGNSRFAWMTRKSEETITPWNFEEVVDKGASAQSFIERMTNFDKNLPNEKVLPKHSLLYEYFTVYNELTKVKYVTEGMRKPAFLSGEQKKAIVDLLFKTNRKVTVKQLKEDYFKKIECFDSVEISGVEDRFNASLGTYHDLLKIIKDKDFLDNEENEDILEDIVLTLTLFEDREMIEERLKTYAHLFDDKVMKQLKRRRYTGWGRLSRKLINGIRDKQSGKTILDFLKSDGFANRNFMQLIHDDSLTFKEDIQKAQVSGQGDSLHEHIANLAGSPAIKKGILQTVKVVDELVKVMGRHKPENIVIEMARENQTTQKGQKNSRERMKRIEEGIKELGSQILKEHPVENTQLQNEKLYLYYLQNGRDMYVDQELDINRLSDYDVDHIVPQSFLKDDSIDNKVLTRSDKNRGKSDNVPSEEVVKKMKNYWRQLLNAKLITQRKFDNLTKAERGGLSELDKAGFIKRQLVETRQITKHVAQILDSRMNTKYDENDKLIREVKVITLKSKLVSDFRKDFQFYKVREINNYHHAHDAYLNAVVGTALIKKYPKLESEFVYGDYKVYDVRKMIAKSEQEIGKATAKYFFYSNIMNFFKTEITLANGEIRKRPLIETNGETGEIVWDKGRDFATVRKVLSMPQVNIVKKTEVQTGGFSKESILPKRNSDKLIARKKDWDPKKYGGFVSPTVAYSVLVVAKVEKGKSKKLKSVKELLGITIMERSSFEKNPIDFLEAKGYKEVKKDLIIKLPKYSLFELENGRKRMLASARELQKGNELALPSKYVNFLYLASHYEKLKGSPEDNEQKQLFVEQHKHYLDEIIEQISEFSKRVILADANLDKVLSAYNKHRDKPIREQAENIIHLFTLTNLGAPAAFKYFDTTIDRKQYRSTKEVLDATLIHQSITGLYETRIDLSQLGGDEGADKRTADGSEFESPKKKRKV

SEQ ID NO: 185 - protein, 1588 aa, Artificial Sequence
  Description of Artificial Sequence: Synthetic polypeptide
MSEVEFSHEYWMRHALTLAKRARDEREVPVGAVLVLNNRVIGEGWNRAIGLHDPTAHAEIMALRQGGLVMQNYRLIDATLYVTFEPCVMCAGAMIHSRIGRVVFGVRNAKTGAAGSLMDVLHHPGMNHRVEITEGILADECAALLCRFFRMPRRVFNAQKKAQSSTDSGGSSGGSSGSETPGTSESATPESSGGSSGGSDKKYSIGLAIGTNSVGWAVITDEYKVPSKKFKVLGNTDRHSIKKNLIGALLFDSGETAEATRLKRTARRRYTRRKNRICYLQEIFSNEMAKVDDSFFHRLEESFLVEEDKKHERHPIFGNIVDEVAYHEKYPTIYHLRKKLVDSTDKADLRLIYLALAHMIKFRGHFLIEGDLNPDNSDVDKLFIQLVQTYNQLFEENPINASGVDAKAILSARLSKSRRLENLIAQLPGEKKNGLFGNLIALSLGLTPNFKSNFDLAEDAKLQLSKDTYDDDLDNLLAQIGDQYADLFLAAKNLSDAILLSDILRVNTEITKAPLSASMIKRYDEHHQDLTLLKALVRQQLPEKYKEIFFDQSKNGYAGYIDGGASQEEFYKFIKPILEKMDGTEELLVKLNREDLLRKQRTFDNGSIPHQIHLGELHAILRRQEDFYPFLKDNREKIEKILTFRIPYYVGPLARGNSRFAWMTRKSEETITPWNFEEVVDKGASAQSFIERMTNFDKNLPNEKVLPKHSLLYEYFTVYNELTKVKYVTEGMRKPAFLSGEQKKAIVDLLFKTNRKVTVKQLKEDYFKKIECFDSVEISGVEDRFNASLGTYHDLLKIIKDKDFLDNEENEDILEDIVLTLTLFEDREMIEERLKTYAHLFDDKVMKQLKRRRYTGWGRLSRKLINGIRDKQSGKTILDFLKSDGFANRNFMQLIHDDSLTFKEDIQKAQVSGQGDSLHEHIANLAGSPAIKKGILQTVKVVDELVKVMGRHKPENIVIEMARENQTTQKGQKNSRERMKRIEEGIKELGSQILKEHPVENTQLQNEKLYLYYLQNGRDMYVDQELDINRLSDYDVDHIVPQSFLKDDSIDNKVLTRSDKNRGKSDNVPSEEVVKKMKNYWRQLLNAKLITQRKFDNLTKAERGGLSELDKAGFIKRQLVETRQITKHVAQILDSRMNTKYDENDKLIREVKVITLKSKLVSDFRKDFQFYKVREINNYHHAHDAYLNAVVGTALIKKYPKLESEFVYGDYKVYDVRKMIAKSEQEIGKATAKYFFYSNIMNFFKTEITLANGEIRKRPLIETNGETGEIVWDKGRDFATVRKVLSMPQVNIVKKTEVQTGGFSKESILPKRNSDKLIARKKDWDPKKYGGFVSPTVAYSVLVVAKVEKGKSKKLKSVKELLGITIMERSSFEKNPIDFLEAKGYKEVKKDLIIKLPKYSLFELENGRKRMLASARELQKGNELALPSKYVNFLYLASHYEKLKGSPEDNEQKQLFVEQHKHYLDEIIEQISEFSKRVILADANLDKVLSAYNKHRDKPIREQAENIIHLFTLTNLGAPAAFKYFDTTIDRKQYRSTKEVLDATLIHQSITGLYETRIDLSQLGGDEGADKRTADGSEFESPKKKRKV

SEQ ID NO: 186 - protein, 1588 aa, Artificial Sequence
  Description of Artificial Sequence: Synthetic polypeptide
MSEVEFSHEYWMRHALTLAKRARDEREVPVGAVLVLNNRVIGEGWNRAIGLHDPTAHAEIMALRQGGLVMQNYRLYDATLYVTFEPCVMCAGAMIHSRIGRVVFGVRNAKTGAAGSLMDVLHYPGMNHRVEITEGILADECAALLCRFFRMPRRVFNAQKKAQSSTDSGGSSGGSSGSETPGTSESATPESSGGSSGGSDKKYSIGLAIGTNSVGWAVITDEYKVPSKKFKVLGNTDRHSIKKNLIGALLFDSGETAEATRLKRTARRRYTRRKNRICYLQEIFSNEMAKVDDSFFHRLEESFLVEEDKKHERHPIFGNIVDEVAYHEKYPTIYHLRKKLVDSTDKADLRLIYLALAHMIKFRGHFLIEGDLNPDNSDVDKLFIQLVQTYNQLFEENPINASGVDAKAILSARLSKSRRLENLIAQLPGEKKNGLFGNLIALSLGLTPNFKSNFDLAEDAKLQLSKDTYDDDLDNLLAQIGDQYADLFLAAKNLSDAILLSDILRVNTEITKAPLSASMIKRYDEHHQDLTLLKALVRQQLPEKYKEIFFDQSKNGYAGYIDGGASQEEFYKFIKPILEKMDGTEELLVKLNREDLLRKQRTFDNGSIPHQIHLGELHAILRRQEDFYPFLKDNREKIEKILTFRIPYYVGPLARGNSRFAWMTRKSEETITPWNFEEVVDKGASAQSFIERMTNFDKNLPNEKVLPKHSLLYEYFTVYNELTKVKYVTEGMRKPAFLSGEQKKAIVDLLFKTNRKVTVKQLKEDYFKKIECFDSVEISGVEDRFNASLGTYHDLLKIIKDKDFLDNEENEDILEDIVLTLTLFEDREMIEERLKTYAHLFDDKVMKQLKRRRYTGWGRLSRKLINGIRDKQSGKTILDFLKSDGFANRNFMQLIHDDSLTFKEDIQKAQVSGQGDSLHEHIANLAGSPAIKKGILQTVKVVDELVKVMGRHKPENIVIEMARENQTTQKGQKNSRERMKRIEEGIKELGSQILKEHPVENTQLQNEKLYLYYLQNGRDMYVDQELDINRLSDYDVDHIVPQSFLKDDSIDNKVLTRSDKNRGKSDNVPSEEVVKKMKNYWRQLLNAKLITQRKFDNLTKAERGGLSELDKAGFIKRQLVETRQITKHVAQILDSRMNTKYDENDKLIREVKVITLKSKLVSDFRKDFQFYKVREINNYHHAHDAYLNAVVGTALIKKYPKLESEFVYGDYKVYDVRKMIAKSEQEIGKATAKYFFYSNIMNFFKTEITLANGEIRKRPLIETNGETGEIVWDKGRDFATVRKVLSMPQVNIVKKTEVQTGGFSKESILPKRNSDKLIARKKDWDPKKYGGFVSPTVAYSVLVVAKVEKGKSKKLKSVKELLGITIMERSSFEKNPIDFLEAKGYKEVKKDLIIKLPKYSLFELENGRKRMLASARELQKGNELALPSKYVNFLYLASHYEKLKGSPEDNEQKQLFVEQHKHYLDEIIEQISEFSKRVILADANLDKVLSAYNKHRDKPIREQAENIIHLFTLTNLGAPAAFKYFDTTIDRKQYRSTKEVLDATLIHQSITGLYETRIDLSQLGGDEGADKRTADGSEFESPKKKRKV

SEQ ID NO: 187 - protein, 1588 aa, Artificial Sequence
  Description of Artificial Sequence: Synthetic polypeptide
MSEVEFSHEYWMRHALTLAKRARDEREVPVGAVLVLNNRVIGEGWNRAIGLHDPTAHAEIMALRQGGLVMQNYRLIDATLYVTFEPCVMCAGAMIHSRIGRVVFGVRNAKTGAAGSLMDVLHYPGMNHRVEITEGILADECAALLCRFFRMPRRVFNAQKKAQSSRDSGGSSGGSSGSETPGTSESATPESSGGSSGGSDKKYSIGLAIGTNSVGWAVITDEYKVPSKKFKVLGNTDRHSIKKNLIGALLFDSGETAEATRLKRTARRRYTRRKNRICYLQEIFSNEMAKVDDSFFHRLEESFLVEEDKKHERHPIFGNIVDEVAYHEKYPTIYHLRKKLVDSTDKADLRLIYLALAHMIKFRGHFLIEGDLNPDNSDVDKLFIQLVQTYNQLFEENPINASGVDAKAILSARLSKSRRLENLIAQLPGEKKNGLFGNLIALSLGLTPNFKSNFDLAEDAKLQLSKDTYDDDLDNLLAQIGDQYADLFLAAKNLSDAILLSDILRVNTEITKAPLSASMIKRYDEHHQDLTLLKALVRQQLPEKYKEIFFDQSKNGYAGYIDGGASQEEFYKFIKPILEKMDGTEELLVKLNREDLLRKQRTFDNGSIPHQIHLGELHAILRRQEDFYPFLKDNREKIEKILTFRIPYYVGPLARGNSRFAWMTRKSEETITPWNFEEVVDKGASAQSFIERMTNFDKNLPNEKVLPKHSLLYEYFTVYNELTKVKYVTEGMRKPAFLSGEQKKAIVDLLFKTNRKVTVKQLKEDYFKKIECFDSVEISGVEDRFNASLGTYHDLLKIIKDKDFLDNEENEDILEDIVLTLTLFEDREMIEERLKTYAHLFDDKVMKQLKRRRYTGWGRLSRKLINGIRDKQSGKTILDFLKSDGFANRNFMQLIHDDSLTFKEDIQKAQVSGQGDSLHEHIANLAGSPAIKKGILQTVKVVDELVKVMGRHKPENIVIEMARENQTTQKGQKNSRERMKRIEEGIKELGSQILKEHPVENTQLQNEKLYLYYLQNGRDMYVDQELDINRLSDYDVDHIVPQSFLKDDSIDNKVLTRSDKNRGKSDNVPSEEVVKKMKNYWRQLLNAKLITQRKFDNLTKAERGGLSELDKAGFIKRQLVETRQITKHVAQILDSRMNTKYDENDKLIREVKVITLKSKLVSDFRKDFQFYKVREINNYHHAHDAYLNAVVGTALIKKYPKLESEFVYGDYKVYDVRKMIAKSEQEIGKATAKYFFYSNIMNFFKTEITLANGEIRKRPLIETNGETGEIVWDKGRDFATVRKVLSMPQVNIVKKTEVQTGGFSKESILPKRNSDKLIARKKDWDPKKYGGFVSPTVAYSVLVVAKVEKGKSKKLKSVKELLGITIMERSSFEKNPIDFLEAKGYKEVKKDLIIKLPKYSLFELENGRKRMLASARELQKGNELALPSKYVNFLYLASHYEKLKGSPEDNEQKQLFVEQHKHYLDEIIEQISEFSKRVILADANLDKVLSAYNKHRDKPIREQAENIIHLFTLTNLGAPAAFKYFDTTIDRKQYRSTKEVLDATLIHQSITGLYETRIDLSQLGGDEGADKRTADGSEFESPKKKRKV

SEQ ID NO: 188 - protein, 1588 aa, Artificial Sequence
  Description of Artificial Sequence: Synthetic polypeptide
MSEVEFSHEYWMRHALTLAKRARDEREVPVGAVLVLNNRVIGEGWNRAIGLHDPTAHAEIMALRQGGLVMQNYRLIDATLYVTFEPCVMCAGAMIHSRIGRVVFGVRNAKTGAAGSLMDVLHYPGMNHRVEITEGILADECAALLCTFFRMPRRVFNAQKKAQSSTDSGGSSGGSSGSETPGTSESATPESSGGSSGGSDKKYSIGLAIGTNSVGWAVITDEYKVPSKKFKVLGNTDRHSIKKNLIGALLFDSGETAEATRLKRTARRRYTRRKNRICYLQEIFSNEMAKVDDSFFHRLEESFLVEEDKKHERHPIFGNIVDEVAYHEKYPTIYHLRKKLVDSTDKADLRLIYLALAHMIKFRGHFLIEGDLNPDNSDVDKLFIQLVQTYNQLFEENPINASGVDAKAILSARLSKSRRLENLIAQLPGEKKNGLFGNLIALSLGLTPNFKSNFDLAEDAKLQLSKDTYDDDLDNLLAQIGDQYADLFLAAKNLSDAILLSDILRVNTEITKAPLSASMIKRYDEHHQDLTLLKALVRQQLPEKYKEIFFDQSKNGYAGYIDGGASQEEFYKFIKPILEKMDGTEELLVKLNREDLLRKQRTFDNGSIPHQIHLGELHAILRRQEDFYPFLKDNREKIEKILTFRIPYYVGPLARGNSRFAWMTRKSEETITPWNFEEVVDKGASAQSFIERMTNFDKNLPNEKVLPKHSLLYEYFTVYNELTKVKYVTEGMRKPAFLSGEQKKAIVDLLFKTNRKVTVKQLKEDYFKKIECFDSVEISGVEDRFNASLGTYHDLLKIIKDKDFLDNEENEDILEDIVLTLTLFEDREMIEERLKTYAHLFDDKVMKQLKRRRYTGWGRLSRKLINGIRDKQSGKTILDFLKSDGFANRNFMQLIHDDSLTFKEDIQKAQVSGQGDSLHEHIANLAGSPAIKKGILQTVKVVDELVKVMGRHKPENIVIEMARENQTTQKGQKNSRERMKRIEEGIKELGSQILKEHPVENTQLQNEKLYLYYLQNGRDMYVDQELDINRLSDYDVDHIVPQSFLKDDSIDNKVLTRSDKNRGKSDNVPSEEVVKKMKNYWRQLLNAKLITQRKFDNLTKAERGGLSELDKAGFIKRQLVETRQITKHVAQILDSRMNTKYDENDKLIREVKVITLKSKLVSDFRKDFQFYKVREINNYHHAHDAYLNAVVGTALIKKYPKLESEFVYGDYKVYDVRKMIAKSEQEIGKATAKYFFYSNIMNFFKTEITLANGEIRKRPLIETNGETGEIVWDKGRDFATVRKVLSMPQVNIVKKTEVQTGGFSKESILPKRNSDKLIARKKDWDPKKYGGFVSPTVAYSVLVVAKVEKGKSKKLKSVKELLGITIMERSSFEKNPIDFLEAKGYKEVKKDLIIKLPKYSLFELENGRKRMLASARELQKGNELALPSKYVNFLYLASHYEKLKGSPEDNEQKQLFVEQHKHYLDEIIEQISEFSKRVILADANLDKVLSAYNKHRDKPIREQAENIIHLFTLTNLGAPAAFKYFDTTIDRKQYRSTKEVLDATLIHQSITGLYETRIDLSQLGGDEGADKRTADGSEFESPKKKRKV

SEQ ID NO: 189 - protein, 1588 aa, Artificial Sequence
  Description of Artificial Sequence: Synthetic polypeptide
MSEVEFSHEYWMRHALTLAKRARDEREVPVGAVLVLNNRVIGEGWNRAIGLHDPTAHAEIMALRQGGLVMQNYRLIDATLYVTFEPCVMCAGAMIHSRIGRVVFGVRNAKTGAAGSLMDVLHYPGMNHRVEITEGILADECAALLCTFFRMPRSVFNAQKKAQSSTDSGGSSGGSSGSETPGTSESATPESSGGSSGGSDKKYSIGLAIGTNSVGWAVITDEYKVPSKKFKVLGNTDRHSIKKNLIGALLFDSGETAEATRLKRTARRRYTRRKNRICYLQEIFSNEMAKVDDSFFHRLEESFLVEEDKKHERHPIFGNIVDEVAYHEKYPTIYHLRKKLVDSTDKADLRLIYLALAHMIKFRGHFLIEGDLNPDNSDVDKLFIQLVQTYNQLFEENPINASGVDAKAILSARLSKSRRLENLIAQLPGEKKNGLFGNLIALSLGLTPNFKSNFDLAEDAKLQLSKDTYDDDLDNLLAQIGDQYADLFLAAKNLSDAILLSDILRVNTEITKAPLSASMIKRYDEHHQDLTLLKALVRQQLPEKYKEIFFDQSKNGYAGYIDGGASQEEFYKFIKPILEKMDGTEELLVKLNREDLLRKQRTFDNGSIPHQIHLGELHAILRRQEDFYPFLKDNREKIEKILTFRIPYYVGPLARGNSRFAWMTRKSEETITPWNFEEVVDKGASAQSFIERMTNFDKNLPNEKVLPKHSLLYEYFTVYNELTKVKYVTEGMRKPAFLSGEQKKAIVDLLFKTNRKVTVKQLKEDYFKKIECFDSVEISGVEDRFNASLGTYHDLLKIIKDKDFLDNEENEDILEDIVLTLTLFEDREMIEERLKTYAHLFDDKVMKQLKRRRYTGWGRLSRKLINGIRDKQSGKTILDFLKSDGFANRNFMQLIHDDSLTFKEDIQKAQVSGQGDSLHEHIANLAGSPAIKKGILQTVKVVDELVKVMGRHKPENIVIEMARENQTTQKGQKNSRERMKRIEEGIKELGSQILKEHPVENTQLQNEKLYLYYLQNGRDMYVDQELDINRLSDYDVDHIVPQSFLKDDSIDNKVLTRSDKNRGKSDNVPSEEVVKKMKNYWRQLLNAKLITQRKFDNLTKAERGGLSELDKAGFIKRQLVETRQITKHVAQILDSRMNTKYDENDKLIREVKVITLKSKLVSDFRKDFQFYKVREINNYHHAHDAYLNAVVGTALIKKYPKLESEFVYGDYKVYDVRKMIAKSEQEIGKATAKYFFYSNIMNFFKTEITLANGEIRKRPLIETNGETGEIVWDKGRDFATVRKVLSMPQVNIVKKTEVQTGGFSKESILPKRNSDKLIARKKDWDPKKYGGFVSPTVAYSVLVVAKVEKGKSKKLKSVKELLGITIMERSSFEKNPIDFLEAKGYKEVKKDLIIKLPKYSLFELENGRKRMLASARELQKGNELALPSKYVNFLYLASHYEKLKGSPEDNEQKQLFVEQHKHYLDEIIEQISEFSKRVILADANLDKVLSAYNKHRDKPIREQAENIIHLFTLTNLGAPAAFKYFDTTIDRKQYRSTKEVLDATLIHQSITGLYETRIDLSQLGGDEGADKRTADGSEFESPKKKRKV

SEQ ID NO: 190 - protein, 1588 aa, Artificial Sequence
  Description of Artificial Sequence: Synthetic polypeptide
MSEVEFSHEYWMRHALTLAKRARDEREVPVGAVLVLNNRVIGEGWNRAIGLHDPTAHAEIMALRQGGLVMQNYRLYDATLYVTFEPCVMCAGAMIHSRIGRVVFGVRNAKTGAAGSLMDVLHHPGMNHRVEITEGILADECAALLCRFFRMPRRVFNAQKKAQSSTDSGGSSGGSSGSETPGTSESATPESSGGSSGGSDKKYSIGLAIGTNSVGWAVITDEYKVPSKKFKVLGNTDRHSIKKNLIGALLFDSGETAEATRLKRTARRRYTRRKNRICYLQEIFSNEMAKVDDSFFHRLEESFLVEEDKKHERHPIFGNIVDEVAYHEKYPTIYHLRKKLVDSTDKADLRLIYLALAHMIKFRGHFLIEGDLNPDNSDVDKLFIQLVQTYNQLFEENPINASGVDAKAILSARLSKSRRLENLIAQLPGEKKNGLFGNLIALSLGLTPNFKSNFDLAEDAKLQLSKDTYDDDLDNLLAQIGDQYADLFLAAKNLSDAILLSDILRVNTEITKAPLSASMIKRYDEHHQDLTLLKALVRQQLPEKYKEIFFDQSKNGYAGYIDGGASQEEFYKFIKPILEKMDGTEELLVKLNREDLLRKQRTFDNGSIPHQIHLGELHAILRRQEDFYPFLKDNREKIEKILTFRIPYYVGPLARGNSRFAWMTRKSEETITPWNFEEVVDKGASAQSFIERMTNFDKNLPNEKVLPKHSLLYEYFTVYNELTKVKYVTEGMRKPAFLSGEQKKAIVDLLFKTNRKVTVKQLKEDYFKKIECFDSVEISGVEDRFNASLGTYHDLLKIIKDKDFLDNEENEDILEDIVLTLTLFEDREMIEERLKTYAHLFDDKVMKQLKRRRYTGWGRLSRKLINGIRDKQSGKTILDFLKSDGFANRNFMQLIHDDSLTFKEDIQKAQVSGQGDSLHEHIANLAGSPAIKKGILQTVKVVDELVKVMGRHKPENIVIEMARENQTTQKGQKNSRERMKRIEEGIKELGSQILKEHPVENTQLQNEKLYLYYLQNGRDMYVDQELDINRLSDYDVDHIVPQSFLKDDSIDNKVLTRSDKNRGKSDNVPSEEVVKKMKNYWRQLLNAKLITQRKFDNLTKAERGGLSELDKAGFIKRQLVETRQITKHVAQILDSRMNTKYDENDKLIREVKVITLKSKLVSDFRKDFQFYKVREINNYHHAHDAYLNAVVGTALIKKYPKLESEFVYGDYKVYDVRKMIAKSEQEIGKATAKYFFYSNIMNFFKTEITLANGEIRKRPLIETNGETGEIVWDKGRDFATVRKVLSMPQVNIVKKTEVQTGGFSKESILPKRNSDKLIARKKDWDPKKYGGFVSPTVAYSVLVVAKVEKGKSKKLKSVKELLGITIMERSSFEKNPIDFLEAKGYKEVKKDLIIKLPKYSLFELENGRKRMLASARELQKGNELALPSKYVNFLYLASHYEKLKGSPEDNEQKQLFVEQHKHYLDEIIEQISEFSKRVILADANLDKVLSAYNKHRDKPIREQAENIIHLFTLTNLGAPAAFKYFDTTIDRKQYRSTKEVLDATLIHQSITGLYETRIDLSQLGGDEGADKRTADGSEFESPKKKRKV

SEQ ID NO: 191 - protein, 1588 aa, Artificial Sequence
  Description of Artificial Sequence: Synthetic polypeptide
MSEVEFSHEYWMRHALTLAKRARDEREVPVGAVLVLNNRVIGEGWNRAIGLHDPTAHAEIMALRQGGLVMQNYRLIDATLYSTFEPCVMCAGAMIHSRIGRVVFGVRNAKTGAAGSLMDVLHYPGMNHRVEITEGILADECAALLCYFFRMPRRVFNAQKKAQSSTDSGGSSGGSSGSETPGTSESATPESSGGSSGGSDKKYSIGLAIGTNSVGWAVITDEYKVPSKKFKVLGNTDRHSIKKNLIGALLFDSGETAEATRLKRTARRRYTRRKNRICYLQEIFSNEMAKVDDSFFHRLEESFLVEEDKKHERHPIFGNIVDEVAYHEKYPTIYHLRKKLVDSTDKADLRLIYLALAHMIKFRGHFLIEGDLNPDNSDVDKLFIQLVQTYNQLFEENPINASGVDAKAILSARLSKSRRLENLIAQLPGEKKNGLFGNLIALSLGLTPNFKSNFDLAEDAKLQLSKDTYDDDLDNLLAQIGDQYADLFLAAKNLSDAILLSDILRVNTEITKAPLSASMIKRYDEHHQDLTLLKALVRQQLPEKYKEIFFDQSKNGYAGYIDGGASQEEFYKFIKPILEKMDGTEELLVKLNREDLLRKQRTFDNGSIPHQIHLGELHAILRRQEDFYPFLKDNREKIEKILTFRIPYYVGPLARGNSRFAWMTRKSEETITPWNFEEVVDKGASAQSFIERMTNFDKNLPNEKVLPKHSLLYEYFTVYNELTKVKYVTEGMRKPAFLSGEQKKAIVDLLFKTNRKVTVKQLKEDYFKKIECFDSVEISGVEDRFNASLGTYHDLLKIIKDKDFLDNEENEDILEDIVLTLTLFEDREMIEERLKTYAHLFDDKVMKQLKRRRYTGWGRLSRKLINGIRDKQSGKTILDFLKSDGFANRNFMQLIHDDSLTFKEDIQKAQVSGQGDSLHEHIANLAGSPAIKKGILQTVKVVDELVKVMGRHKPENIVIEMARENQTTQKGQKNSRERMKRIEEGIKELGSQILKEHPVENTQLQNEKLYLYYLQNGRDMYVDQELDINRLSDYDVDHIVPQSFLKDDSIDNKVLTRSDKNRGKSDNVPSEEVVKKMKNYWRQLLNAKLITQRKFDNLTKAERGGLSELDKAGFIKRQLVETRQITKHVAQILDSRMNTKYDENDKLIREVKVITLKSKLVSDFRKDFQFYKVREINNYHHAHDAYLNAVVGTALIKKYPKLESEFVYGDYKVYDVRKMIAKSEQEIGKATAKYFFYSNIMNFFKTEITLANGEIRKRPLIETNGETGEIVWDKGRDFATVRKVLSMPQVNIVKKTEVQTGGFSKESILPKRNSDKLIARKKDWDPKKYGGFVSPTVAYSVLVVAKVEKGKSKKLKSVKELLGITIMERSSFEKNPIDFLEAKGYKEVKKDLIIKLPKYSLFELENGRKRMLASARELQKGNELALPSKYVNFLYLASHYEKLKGSPEDNEQKQLFVEQHKHYLDEIIEQISEFSKRVILADANLDKVLSAYNKHRDKPIREQAENIIHLFTLTNLGAPAAFKYFDTTIDRKQYRSTKEVLDATLIHQSITGLYETRIDLSQLGGDEGADKRTADGSEFESPKKKRKV

SEQ ID NO: 192 - protein, 4 aa, Artificial Sequence
  Description of Artificial Sequence: Synthetic peptide
SGGS

SEQ ID NO: 193 - protein, 21 aa, Artificial Sequence
  Description of Artificial Sequence: Synthetic peptide
  MISC_FEATURE (1)..(21): This sequence may encompass 1, 3, or 7 "Gly Gly Ser" repeating units
GGSGGSGGSGGSGGSGGSGGS

SEQ ID NO: 194 - protein, 5 aa, Artificial Sequence
  Description of Artificial Sequence: Synthetic peptide
PAPAP

SEQ ID NO: 195 - protein, 6 aa, Artificial Sequence
  Description of Artificial Sequence: Synthetic peptide
PAPAPA

SEQ ID NO: 196 - protein, 7 aa, Artificial Sequence
  Description of Artificial Sequence: Synthetic peptide
PAPAPAP

SEQ ID NO: 197 - protein, 8 aa, Artificial Sequence
  Description of Artificial Sequence: Synthetic peptide
PAPAPAPA

SEQ ID NO: 198 - protein, 9 aa, Artificial Sequence
  Description of Artificial Sequence: Synthetic peptide
PAPAPAPAP

SEQ ID NO: 199 - protein, 15 aa, Artificial Sequence
  Description of Artificial Sequence: Synthetic peptide
PAPAPAPAPAPAPAP

SEQ ID NO: 200 - protein, 21 aa, Artificial Sequence
  Description of Artificial Sequence: Synthetic peptide
PAPAPAPAPAPAPAPAPAPAP

SEQ ID NO: 201 - protein, 167 aa, Artificial Sequence
  Description of Artificial Sequence: Synthetic polypeptide
MSEVEFSHEYWMRHALTLAKRARDEREVPVGAVLVLNNRVIGEGWNRAIGLHDPTAHAEIMALRQGGLVMQNYRLIDATLYVTFEPCVMCAGAMIHSRIGRVVFGVRNAKTGAAGSLMDVLHYPGMNHRVEITEGILADECAALLCRFFRMPRQVFNAQKKAQSSTD

SEQ ID NO: 202 - protein, 167 aa, Artificial Sequence
  Description of Artificial Sequence: Synthetic polypeptide
MSEVEFSHEYWMRHALTLAKRARDEREVPVGAVLVLNNRVIGEGWNRAIGLHDPTAHAEIMALRQGGLVMQNYRLIDATLYVTFEPCVMCAGAMIHSRIGRVVFGVRNAKTGAAGSLMDVLHYPGMNHRVEITEGILADECAALLCYFFRMPRSVFNAQKKAQSSTD

SEQ ID NO: 203 - protein, 167 aa, Artificial Sequence
  Description of Artificial Sequence: Synthetic polypeptide
MSEVEFSHEYWMRHALTLAKRARDEREVPVGAVLVLNNRVIGEGWNRAIGLHDPTAHAEIMALRQGGLVMQNYRLIDATLYVTFEPCVMCAGAMIHSRIGRVVFGVRNAKTGAAGSLMDVLHHPGMNHRVEITEGILADECAALLCYFFRMPRQVFNAQKKAQSSTD

SEQ ID NO: 204 - protein, 167 aa, Artificial Sequence
  Description of Artificial Sequence: Synthetic polypeptide
MSEVEFSHEYWMRHALTLAKRARDEREVPVGAVLVLNNRVIGEGWNRAIGLHDPTAHAEIMALRQGGLVMQNYRLIDATLYSTFEPCVMCAGAMIHSRIGRVVFGVRNAKTGAAGSLMDVLHYPGMNHRVEITEGILADECAALLCYFFRMPRQVFNAQKKAQSSTD

SEQ ID NO: 205 - protein, 167 aa, Artificial Sequence
  Description of Artificial Sequence: Synthetic polypeptide
MSEVEFSHEYWMRHALTLAKRARDEREVPVGAVLVLNNRVIGEGWNRAIGLHDPTAHAEIMALRQGGLVMQNYRLIDATLYVTFEPCVMCAGAMIHSRIGRVVFGVRNAKTGAAGSLMDVLHYPGMNHRVEITEGILADECAALLCYFFRMPRQVFNAQKKAQSSRD

SEQ ID NO: 206 - protein, 167 aa, Artificial Sequence
  Description of Artificial Sequence: Synthetic polypeptide
MSEVEFSHEYWMRHALTLAKRARDEREVPVGAVLVLNNRVIGEGWNRAIGLHDPTAHAEIMALRQGGLVMQNYRLIDATLYVTFEPCVMCAGAMIHSRIGRVVFGVRNAKTGAAGSLMDVLHYPGMNHRVEITEGILADECAALLCYFFRMPRRVFNAQKKAQSSTD

SEQ ID NO: 207 - protein, 167 aa, Artificial Sequence
  Description of Artificial Sequence: Synthetic polypeptide
MSEVEFSHEYWMRHALTLAKRARDEREVPVGAVLVLNNRVIGEGWNRAIGLHDPTAHAEIMALRQGGLVMQNYRLIDATLYVTFEPCVMCAGAMIHSRIGRVVFGVRNAKTGAAGSLMDVLHHPGMNHRVEITEGILADECAALLCRFFRMPRRVFNAQKKAQSSTD

SEQ ID NO: 208 - protein, 167 aa, Artificial Sequence
  Description of Artificial Sequence: Synthetic polypeptide
MSEVEFSHEYWMRHALTLAKRARDEREVPVGAVLVLNNRVIGEGWNRAIGLHDPTAHAEIMALRQGGLVMQNYRLYDATLYVTFEPCVMCAGAMIHSRIGRVVFGVRNAKTGAAGSLMDVLHYPGMNHRVEITEGILADECAALLCRFFRMPRRVFNAQKKAQSSTD

SEQ ID NO: 209 - protein, 167 aa, Artificial Sequence
  Description of Artificial Sequence: Synthetic polypeptide
MSEVEFSHEYWMRHALTLAKRARDEREVPVGAVLVLNNRVIGEGWNRAIGLHDPTAHAEIMALRQGGLVMQNYRLIDATLYVTFEPCVMCAGAMIHSRIGRVVFGVRNAKTGAAGSLMDVLHYPGMNHRVEITEGILADECAALLCRFFRMPRRVFNAQKKAQSSRD

SEQ ID NO: 210 - protein, 167 aa, Artificial Sequence
  Description of Artificial Sequence: Synthetic polypeptide
MSEVEFSHEYWMRHALTLAKRARDEREVPVGAVLVLNNRVIGEGWNRAIGLHDPTAHAEIMALRQGGLVMQNYRLIDATLYVTFEPCVMCAGAMIHSRIGRVVFGVRNAKTGAAGSLMDVLHYPGMNHRVEITEGILADECAALLCTFFRMPRRVFNAQKKAQSSTD

SEQ ID NO: 211 - protein, 167 aa, Artificial Sequence
  Description of Artificial Sequence: Synthetic polypeptide
MSEVEFSHEYWMRHALTLAKRARDEREVPVGAVLVLNNRVIGEGWNRAIGLHDPTAHAEIMALRQGGLVMQNYRLIDATLYVTFEPCVMCAGAMIHSRIGRVVFGVRNAKTGAAGSLMDVLHYPGMNHRVEITEGILADECAALLCTFFRMPRSVFNAQKKAQSSTD

SEQ ID NO: 212 - protein, 167 aa, Artificial Sequence
  Description of Artificial Sequence: Synthetic polypeptide
MSEVEFSHEYWMRHALTLAKRARDEREVPVGAVLVLNNRVIGEGWNRAIGLHDPTAHAEIMALRQGGLVMQNYRLYDATLYVTFEPCVMCAGAMIHSRIGRVVFGVRNAKTGAAGSLMDVLHHPGMNHRVEITEGILADECAALLCRFFRMPRRVFNAQKKAQSSTD

SEQ ID NO: 213 - protein, 167 aa, Artificial Sequence
  Description of Artificial Sequence: Synthetic polypeptide
MSEVEFSHEYWMRHALTLAKRARDEREVPVGAVLVLNNRVIGEGWNRAIGLHDPTAHAEIMALRQGGLVMQNYRLIDATLYSTFEPCVMCAGAMIHSRIGRVVFGVRNAKTGAAGSLMDVLHYPGMNHRVEITEGILADECAALLCYFFRMPRRVFNAQKKAQSSTD

SEQ ID NO: 214 - DNA, 20 bp, Artificial Sequence
  Description of Artificial Sequence: Synthetic oligonucleotide
  Description of Combined DNA/RNA Molecule: Synthetic oligonucleotide
gcggguaacagctgcagcau

SEQ ID NO: 215 - RNA, 83 nt, Artificial Sequence
  Description of Artificial Sequence: Synthetic oligonucleotide
guuuuagagcuagaaauagcaaguuaaaauaaggcuaguccguuaucaacuugaaaaaguggcaccgagucggugcuuuuuuu

SEQ ID NO: 216 - DNA, 83 bp, Artificial Sequence
  Description of Artificial Sequence: Synthetic oligonucleotide
gttttagagctagaaatagcaagttaaaataaggctagtccgttatcaacttgaaaaagtggcaccgagtcggtgcttttttt

SEQ ID NO: 217 - DNA, 80 bp, Unknown
  Description of Unknown: SBDS sequence
ctaaaggtcaggttgccaaaaaggaagatctcatcagtgcgtttggaacagatgaccaaactgaaatctgtaagcaggtg

SEQ ID NO: 218 - DNA, 80 bp, Unknown
  Description of Unknown: SBDSP sequence
cctaaggtcaggttgccaagaaggaagatctcatcagtgcgtttggaacagatgaccaaactgaaatctgtaagcaggcg

SEQ ID NO: 219 - DNA, 80 bp, Artificial Sequence
  Description of Artificial Sequence: Synthetic oligonucleotide
cctaaggtcaggttgccaaaaaggaagatctcatcagtgcgtttggaacagatgaccaaactgaaatctgtaagcaggtg

SEQ ID NO: 220 - DNA, 80 bp, Artificial Sequence
  Description of Artificial Sequence: Synthetic oligonucleotide
ctaaaggtcaggttgccaaaaaggaagatctcatcagtgcgtttggaacagatgaccaaactgaaatctgtaagcaggcg

SEQ ID NO: 221 - DNA, 80 bp, Artificial Sequence; identical to SEQ ID NO: 218
  Description of Artificial Sequence: Synthetic oligonucleotide

SEQ ID NO: 222 - DNA, 37 bp, Artificial Sequence
  Description of Artificial Sequence: Synthetic oligonucleotide
  CDS (2)..(16)
  CDS (20)..(37)
gtttgtaaatgtttcctaaggtcaggttgccaaaaag

SEQ ID NO: 223 - protein, 5 aa, Artificial Sequence
  Description of Artificial Sequence: Synthetic peptide
FVNVS

SEQ ID NO: 224 - protein, 6 aa, Artificial Sequence
  Description of Artificial Sequence: Synthetic peptide
GQVAKK

SEQ ID NO: 225 - DNA, 64 bp, Artificial Sequence
  Description of Artificial Sequence: Synthetic oligonucleotide
gatgaccaaactgaaatctgtaagcaggygggtaacagctgcagcatagctaaccctaataacc

SEQ ID NO: 226 - DNA, 64 bp, Artificial Sequence
  Description of Artificial Sequence: Synthetic oligonucleotide
  CDS (1)..(27)
gatgaccaaactgaaatctgtaagcaggtgggtaacagctgcagcatagctaaccctaataacc

SEQ ID NO: 227 - protein, 9 aa, Artificial Sequence
  Description of Artificial Sequence: Synthetic peptide
DDQTEICKQ

SEQ ID NO: 228 - DNA, 64 bp, Artificial Sequence
  Description of Artificial Sequence: Synthetic oligonucleotide
gatgaccaaactgaaatctgtaagcaggcgggtaacagctgcagcatagctaaccctaataacc

SEQ ID NO: 229 - DNA, 30 bp, Artificial Sequence
  Description of Artificial Sequence: Synthetic oligonucleotide
ctgtaagcaggcgggtaacagctgcagcat

SEQ ID NO: 230 - DNA, 21 bp, Unknown
  Description of Unknown: target sequence
caggcgggtaacagctgcagc

SEQ ID NO: 231 - DNA, 20 bp, Unknown
  Description of Unknown: target sequence
aggcgggtaacagctgcagc

SEQ ID NO: 232 - DNA, 24 bp, Unknown
  Description of Unknown: target sequence
aagcaggcgggtaacagctgcagc

SEQ ID NO: 233 - protein, 167 aa, Escherichia coli; identical to SEQ ID NO: 23

SEQ ID NO: 234 - protein, 198 aa, Mus musculus [sequence omitted]
